(19) United States
(12) Patent Application Publication
(10) Pub. No.: US 2013/0288310 A1
(43) Pub. Date: Oct. 31, 2013

(54) RECOMBINANT LIGNOCELLULOSE DEGRADATION ENZYMES FOR THE PRODUCTION OF SOLUBLE SUGARS FROM CELLULOSIC BIOMASS

(71) Applicants: Louis Clark, San Francisco, CA (US); Dipnath Baidyaroy, Fremont, CA (US)

(72) Inventors: Louis Clark, San Francisco, CA (US); Dipnath Baidyaroy, Fremont, CA (US)

(73) Assignee: Codexis, Inc, Redwood City, CA (US)

(21) Appl. No.: 13/818,393

(22) PCT Filed: Aug. 22, 2011
(86) PCT No.: PCT/US2011/048659

§ 371 Date: Jul. 15, 2013

Related U.S. Application Data
(60) Provisional application No. 61/376,188, filed on Aug. 23, 2010.

(51) Int. Cl. C12N 9/24

(52) U.S. Cl. CPC C12N 9/2402
USPC 435/99; 435/200; 435/197; 435/190; 435/189; 536/23.2; 435/320.1; 435/254.11; 435/254.2; 435/254.3; 435/254.7; 435/254.8; 435/254.4; 435/254.5; 435/254.9; 435/254.6; 435/254.22; 435/254.21; 435/254.23; 435/257.2; 435/252.3; 435/252.32; 435/252.33; 435/252.35; 435/252.31; 435/252.34

(57) ABSTRACT

The invention relates to C1 lignocellulose degradation enzyme nucleic acid and protein sequences and expression of recombinant C1 lignocellulose degradation enzymes. The invention provides methods for degrading a cellulosic biomass by contacting the biomass with a recombinant C1 lignocellulose degradation enzyme of the invention.

### CROSS-REFERENCE TO RELATED APPLICATIONS

[0001] The application claims benefit of U.S. provisional application No. 61/376,188, filed Aug. 23, 2010, which application is herein incorporated by reference for all purposes.

### FIELD OF THE INVENTION

[0002] The invention relates to expression of recombinant C1 enzymes involved in lignocellulose degradation and their use in the production of soluble sugars from cellulosic biomass.

### REFERENCE TO A “SEQUENCE LISTING,” A TABLE, OR A COMPUTER PROGRAM LISTING APPENDIX SUBMITTED AS A TEXT FILE

[0003] The ASCII text file SEQTXT_{—}90834-818631.TXT contains a sequence listing submitted under 37 CFR 1.821. The ASCII text file was created Aug. 22, 2011 and is 3,744,719 bytes in size. The material contained in this text file is herein incorporated by reference.

### BACKGROUND OF THE INVENTION

[0004] Cellulosic biomass is a significant renewable resource for the generation of sugars. Fermentation of these sugars can yield commercially valuable end-products, including biofuels and chemicals that are currently derived from petroleum. While the fermentation of simple sugars to ethanol is relatively straightforward, the efficient conversion of cellulosic biomass to fermentable sugars such as glucose is challenging. See, e.g., Ladisch et al., 1983, Enzyme Microb. Technol. 5:82. Cellulose may be pretreated chemically, mechanically or in other ways to increase the susceptibility of cellulose to hydrolysis. Such pretreatment may be followed by the enzymatic conversion of cellulose to glucose, cellobiose, cello-oligosaccharides and the like, using enzymes that specialize in breaking down the β-1-4 glycosidic bonds of cellulose. These enzymes are collectively referred to as “cellulases”.

[0005] Cellulases are divided into three sub-categories of enzymes: 1,4-β-D-glucan glucanohydrolase (“endoglucanase” or “EG”); 1,4-β-D-glucan cellobiohydrolase (“exoglucanase”, “cellobiohydrolase”, or “CBH”); and β-D-glucoside-glucohydrolase (“β-glucosidase”, “cellobiase” or “BG”). Endoglucanases randomly attack the interior parts and mainly the amorphous regions of cellulose. Exoglucanases incrementally shorten the glucan molecules by binding to the glucan ends and releasing mainly cellobiose units from the ends of the cellulose polymer. O-glucosidases split the cellobiose, a water-soluble β-1,4-linked dimer of glucose, into two units of glucose. Efficient production of cellulases for use in processing cellulosic biomass would reduce costs and increase the efficiency of production of biofuels and other commercially valuable compounds.

[0006] Other enzymes (“accessory enzymes” or “accessory proteins”) also participate in degradation of lignocellulose to obtain sugars. These enzymes include esterases, lipases, laccases, and other oxidative enzymes such as oxidoreductases, and the like.

[0007] In the context of this invention, the enzymes involved in degrading lignocellulose, e.g., a glycoside hydrolase or accessory enzyme, are collectively referred to as lignocellulose degradation enzymes.

### SUMMARY OF THE INVENTION

[0008] In one aspect, the invention provides a method of producing a lignocellulose degradation enzyme. The method involves culturing a cell comprising a recombinant polynucleotide sequence that encodes a C1 lignocellulose degradation enzyme comprising an amino acid sequence selected from SEQ ID NO:2, SEQ ID NO: 4, SEQ ID NO: 6, SEQ ID NO: 8, SEQ ID NO: 10, SEQ ID NO: 12, SEQ ID NO: 14, SEQ ID NO: 16, SEQ ID NO: 18, SEQ ID NO: 20, SEQ ID NO: 22, SEQ ID NO: 24, SEQ ID NO: 26, SEQ ID NO: 28, SEQ ID NO: 30, SEQ ID NO: 32, SEQ ID NO: 34, SEQ ID NO: 36, SEQ ID NO: 38, SEQ ID NO: 40, SEQ ID NO: 42, SEQ ID NO: 44, SEQ ID NO: 46, SEQ ID NO: 48, SEQ ID NO: 50, SEQ ID NO: 52, SEQ ID NO: 54, SEQ ID NO: 56, SEQ ID NO: 58, SEQ ID NO: 60, SEQ ID NO: 62, SEQ ID NO: 64, SEQ ID NO: 66, SEQ ID NO: 68, SEQ ID NO: 70, SEQ ID NO: 72, SEQ ID NO: 74, SEQ ID NO: 76, SEQ ID NO: 78, SEQ ID NO: 80, SEQ ID NO: 82, SEQ ID NO: 84, SEQ ID NO: 86, SEQ ID NO: 88, SEQ ID NO: 90, SEQ ID NO: 92, SEQ ID NO: 94, SEQ ID NO: 96, SEQ ID NO: 98, SEQ ID NO: 100, SEQ ID NO: 102, SEQ ID NO: 104, SEQ ID NO: 106, SEQ ID NO: 108, SEQ ID NO: 110, SEQ ID NO: 112, SEQ ID NO: 114, SEQ ID NO: 116, SEQ ID NO: 118, SEQ ID NO: 120, SEQ ID NO: 122, SEQ ID NO: 124, SEQ ID NO: 126, SEQ ID NO: 128, SEQ ID NO: 130, SEQ ID NO: 132, SEQ ID NO: 134, SEQ ID NO: 136, SEQ ID NO: 138, SEQ ID NO: 140, SEQ ID NO: 142, SEQ ID NO: 144, SEQ ID NO: 146, SEQ ID NO: 148, SEQ ID NO: 150, SEQ ID NO: 152, SEQ ID NO: 154, SEQ ID NO: 156, SEQ ID NO: 158, SEQ ID NO: 160, SEQ ID NO: 162, SEQ ID NO: 164, SEQ ID NO: 166, SEQ ID NO: 168, SEQ ID NO: 170, SEQ ID NO: 172, SEQ ID NO: 174, SEQ ID NO: 176, or SEQ ID NO: 178; or an amino acid sequence selected from SEQ ID NO: 180, SEQ ID NO: 182, SEQ ID NO: 184, SEQ ID NO: 186, SEQ ID NO: 188, SEQ ID NO: 190, SEQ ID NO: 192, SEQ ID NO: 194, SEQ ID NO: 196, SEQ ID NO: 198, SEQ ID NO: 200, SEQ ID NO: 202, SEQ ID NO: 204, SEQ ID NO: 206, SEQ ID NO: 208, SEQ ID NO: 210, SEQ ID NO: 212, SEQ ID NO: 214, SEQ ID NO: 216, SEQ ID NO: 218, SEQ ID NO: 220, SEQ ID NO: 222, SEQ ID NO: 224, SEQ ID NO: 226, SEQ ID NO: 228, SEQ ID NO: 230, SEQ ID NO: 232, SEQ ID NO: 234, SEQ ID NO: 236, SEQ ID NO: 238, SEQ ID NO: 240, SEQ ID NO: 242, SEQ ID NO: 244, SEQ ID NO: 246, SEQ ID NO: 248, SEQ ID NO: 250, SEQ ID NO: 252, SEQ ID NO: 254, SEQ ID NO: 256, SEQ ID NO: 258, SEQ ID NO: 260, SEQ ID NO: 262, SEQ ID NO: 264, SEQ ID NO: 266, SEQ ID NO: 268, SEQ ID NO: 270, SEQ ID NO: 272, SEQ ID NO: 274, SEQ ID NO: 276, SEQ ID NO: 278, SEQ ID NO: 280, SEQ ID NO: 282, SEQ ID NO: 284, SEQ ID NO: 286, SEQ ID NO: 288, SEQ ID NO: 290, SEQ ID NO: 292, SEQ ID NO: 294, SEQ ID NO: 296, SEQ ID NO: 298, SEQ ID NO: 300, SEQ ID NO: 302, SEQ ID NO: 304, SEQ ID NO: 306, SEQ ID NO: 308, SEQ ID NO: 310, SEQ ID NO: 312, SEQ ID NO: 314, SEQ ID NO: 316, SEQ ID NO: 318, SEQ ID NO: 320, SEQ ID NO: 322, SEQ ID NO: 324, SEQ ID NO: 326, SEQ ID NO: 328, SEQ ID NO: 330, SEQ ID NO: 332, SEQ ID NO: 334, SEQ ID NO: 336, SEQ ID NO: 338, SEQ ID NO: 340, SEQ ID NO: 342, SEQ ID NO: 344, SEQ ID NO: 346, SEQ ID NO: 348, SEQ ID NO: 350, SEQ ID NO: 352, SEQ ID NO: 354, SEQ ID NO: 356, SEQ ID NO: 358, SEQ ID NO: 360, SEQ ID NO: 362, SEQ ID NO: 364, SEQ ID NO: 366, SEQ ID NO: 368, SEQ ID NO: 370, SEQ ID NO: 372, SEQ ID NO: 374, SEQ ID NO: 376, SEQ ID NO: 378, SEQ ID NO: 380, SEQ ID NO: 382, SEQ ID NO: 384, SEQ ID NO: 386, SEQ ID NO: 388, SEQ ID NO: 390, SEQ ID NO: 392, SEQ ID NO: 394, SEQ ID NO: 396, SEQ ID NO: 398, SEQ ID NO: 400, SEQ ID NO: 402, SEQ ID NO: 404, SEQ ID NO: 406, SEQ ID NO: 408, SEQ ID NO: 410, SEQ ID NO: 412, SEQ ID NO: 414, SEQ ID NO: 416, SEQ ID NO: 418, SEQ ID NO: 420, SEQ ID NO: 422, SEQ ID NO: 424, SEQ ID NO: 426, SEQ ID NO: 428, SEQ ID NO: 430, SEQ ID NO: 432, SEQ ID NO: 434, SEQ ID NO: 436, SEQ ID NO: 438, SEQ ID NO: 440, SEQ ID NO: 442, SEQ ID NO: 444, SEQ ID NO: 446, SEQ ID NO: 448, SEQ ID NO: 450, SEQ ID NO: 452, SEQ ID NO: 454, SEQ ID NO: 456, SEQ ID NO: 458, SEQ ID NO: 460, SEQ ID NO: 462, SEQ ID NO: 464, SEQ ID NO: 466, SEQ ID NO: 468, SEQ ID NO: 470, SEQ ID NO: 472, SEQ ID NO: 474, SEQ ID NO: 476, SEQ ID NO: 478, SEQ ID NO: 480, SEQ ID NO: 482, SEQ ID NO: 484, SEQ ID NO: 486, SEQ ID NO: 488, SEQ ID NO: 490, SEQ ID NO: 492, SEQ ID NO: 494, SEQ ID NO: 496, SEQ ID NO: 498, SEQ ID NO: 500, SEQ ID NO: 502, SEQ ID NO: 504, SEQ ID NO: 506, SEQ ID NO: 508, SEQ ID NO: 510, SEQ ID NO: 512, SEQ ID NO: 514, SEQ ID NO: 516, SEQ ID NO: 518, SEQ ID NO: 520, SEQ ID NO: 522, SEQ ID NO: 524, SEQ ID NO: 526, SEQ ID NO: 528, SEQ ID NO: 530, SEQ ID NO: 532, SEQ ID NO: 534, SEQ ID NO: 536, SEQ ID NO: 538, SEQ ID NO: 540, SEQ ID NO: 542, SEQ ID NO: 544, SEQ ID NO: 546, SEQ ID NO: 548, SEQ ID NO: 550, SEQ ID NO: 552, SEQ ID NO: 554, SEQ ID NO: 556, SEQ ID NO: 558, SEQ ID NO: 560, SEQ ID NO: 562, SEQ ID NO: 564, SEQ ID NO: 566, SEQ ID NO: 568, SEQ ID NO: 570, SEQ ID NO: 572, SEQ ID NO: 574, SEQ ID NO: 576, SEQ ID NO: 578, SEQ ID NO: 580, SEQ ID NO: 582, SEQ ID NO: 584, SEQ ID NO: 586, SEQ ID NO: 588, SEQ ID NO: 590, SEQ ID NO: 592, SEQ ID NO: 594, SEQ ID NO: 596, SEQ ID NO: 598, SEQ ID NO: 600, SEQ ID NO: 602, SEQ ID NO: 604, SEQ ID NO: 606, SEQ ID NO: 608, SEQ ID NO: 610, SEQ ID NO: 612, SEQ ID NO: 614, SEQ ID NO: 616, SEQ ID NO: 618, SEQ ID NO: 620, SEQ ID NO: 622, SEQ ID NO: 624, SEQ ID NO: 626, SEQ ID NO: 628, SEQ ID NO: 630, SEQ ID NO: 632, SEQ ID NO: 634, SEQ ID NO: 636, SEQ ID NO: 638, SEQ ID NO: 640, SEQ ID NO: 642, SEQ ID NO: 644, SEQ ID NO: 646, SEQ ID NO: 648, SEQ ID NO: 650, SEQ ID NO: 652, SEQ ID NO: 654, SEQ ID NO: 656, SEQ ID NO: 658, SEQ ID NO: 660, SEQ ID NO: 662, SEQ ID NO: 664, SEQ ID NO: 666, SEQ ID NO: 668, SEQ ID NO: 670, SEQ ID NO: 672, SEQ ID NO: 674, SEQ ID NO: 676, SEQ ID NO: 678, SEQ ID NO: 680, SEQ ID NO: 682, SEQ ID NO: 684, SEQ ID NO: 686, SEQ ID NO: 688, SEQ ID NO: 690, SEQ ID NO: 692, SEQ ID NO: 694, SEQ ID NO: 696, SEQ ID NO: 698, SEQ ID NO: 700, SEQ ID NO: 702, SEQ ID NO: 704, SEQ ID NO: 706, SEQ ID NO: 708, SEQ ID NO: 710, SEQ ID NO: 712, SEQ ID NO: 714, SEQ ID NO: 716, SEQ ID NO: 718, or SEQ ID NO: 720. In some embodiments, the recombinant polynucleotide sequence is operably linked to a promoter, or the polynucleotide sequence is present in multiple copies operably linked to a promoter, under conditions in which the lignocellulose degradation enzyme is produced. In some embodiments, the promoter is a heterologous promoter. In some embodiments, the lignocellulose degradation enzyme comprises a fragment that is less than the full-length of a polypeptide identified in Table 2. In some embodiments, the fragment comprises a number of contiguous amino acid residues of the sequence that is at least the number shown in Column 4 and less than the length shown in column 3 for that sequence. In some embodiments, the fragment comprises a number of contiguous amino acid residues of the sequence that is from 20 to 30 residues fewer in length than the number shown in Column 3. In some embodiments, the polypeptide comprises a lignocellulose degradation enzyme polypeptide that consists of an amino acid sequence set forth in Table 2. Optionally, the polynucleotide sequence encoding a C1 lignocellulose degradation enzyme of the invention has a nucleotide sequence selected from SEQ ID NO: 1, SEQ ID NO: 3, SEQ ID NO: 5, SEQ ID NO: 7, SEQ ID NO: 9, SEQ ID NO: 11, SEQ ID NO: 13, SEQ ID NO: 15, SEQ ID NO: 17, SEQ ID NO: 19, SEQ ID NO: 21, SEQ ID NO: 23, SEQ ID NO: 25, SEQ ID NO: 27, SEQ ID NO: 29, SEQ ID NO: 31, SEQ ID NO: 33, SEQ ID NO: 35, SEQ ID NO: 37, SEQ ID NO: 39, SEQ ID NO: 41, SEQ ID NO: 43, SEQ ID NO: 45, SEQ ID NO: 47, SEQ ID NO: 49, SEQ ID NO: 51, SEQ ID NO: 53, SEQ ID NO: 55, SEQ ID NO: 57, SEQ ID NO: 59, SEQ ID NO: 61, SEQ ID NO: 63, SEQ ID NO: 65, SEQ ID NO: 67, SEQ ID NO: 69, SEQ ID NO: 71, SEQ ID NO: 73, SEQ ID NO: 75, SEQ ID NO: 77, SEQ ID NO: 79, SEQ ID NO: 81, SEQ ID NO: 83, SEQ ID NO: 85, SEQ ID NO: 87, SEQ ID NO: 89, SEQ ID NO: 91, SEQ ID NO: 93, SEQ ID NO: 95, SEQ ID NO: 97, SEQ ID NO: 99, SEQ ID NO: 101, SEQ ID NO: 103, SEQ ID NO: 105, SEQ ID NO: 107, SEQ ID NO: 109, SEQ ID NO: 111, SEQ ID NO: 113, SEQ ID NO: 115, SEQ ID NO: 117, SEQ ID NO: 119, SEQ ID NO: 121, SEQ ID NO: 123, SEQ ID NO: 125, SEQ ID NO: 127, SEQ ID NO: 129, SEQ ID NO: 131, SEQ ID NO: 133, SEQ ID NO: 135, SEQ ID NO: 137, SEQ ID NO: 139, SEQ ID NO: 141, SEQ ID NO: 143, SEQ ID NO: 145, SEQ ID NO: 147, SEQ ID NO: 149, SEQ ID NO: 151, SEQ ID NO: 153, SEQ ID NO: 155, SEQ ID NO: 157, SEQ ID NO: 159, SEQ ID NO: 161, SEQ ID NO: 163, SEQ ID NO: 165, SEQ ID NO: 167, SEQ ID NO: 169, SEQ ID NO: 171, SEQ ID NO: 173, SEQ ID NO: 175, or SEQ ID NO: 177; or a nucleotide sequence selected from SEQ ID NO: 179, SEQ ID NO: 181, SEQ ID NO: 183, SEQ ID NO: 185, SEQ ID NO: 187, SEQ ID NO: 189, SEQ ID NO: 191, SEQ ID NO: 193, SEQ ID NO: 195, SEQ ID NO: 197, SEQ ID NO: 199, SEQ ID NO: 201, SEQ ID NO: 203, SEQ ID NO: 205, SEQ ID NO: 207, SEQ ID NO: 209, SEQ ID NO: 211, SEQ ID NO: 213, SEQ ID NO: 215, SEQ ID NO: 217, SEQ ID NO: 219, SEQ ID NO: 221, SEQ ID NO: 223, SEQ ID NO: 225, SEQ ID NO: 227, SEQ ID NO: 229, SEQ ID NO: 231, SEQ ID NO: 233, SEQ ID NO: 235, SEQ ID NO: 237, SEQ ID NO: 239, SEQ ID NO: 241, SEQ ID NO: 243, SEQ ID NO: 245, SEQ ID NO: 247, SEQ ID NO: 249, SEQ ID NO: 251, SEQ ID NO: 253, SEQ ID NO: 255, SEQ ID NO: 257, SEQ ID NO: 259, SEQ ID NO: 261, SEQ ID NO: 263, SEQ ID NO: 265, SEQ ID NO: 267, SEQ ID NO: 269, SEQ ID NO: 271, SEQ ID NO: 273, SEQ ID NO: 275, SEQ ID NO: 277, SEQ ID NO: 279, SEQ ID NO: 281, SEQ ID NO: 283, SEQ ID NO: 285, SEQ ID NO: 287, SEQ ID NO: 289, SEQ ID NO: 291, SEQ ID NO: 293, SEQ ID NO: 295, SEQ ID NO: 297, SEQ ID NO: 299, SEQ ID NO: 301, SEQ ID NO: 303, SEQ ID NO: 305, SEQ ID NO: 307, SEQ ID NO: 309, SEQ ID NO: 311, SEQ ID NO: 313, SEQ ID NO: 315, SEQ ID NO: 317, SEQ ID NO: 319, SEQ ID NO: 321, SEQ ID NO: 323, SEQ ID NO: 325, SEQ ID NO: 327, SEQ ID NO: 329, SEQ ID NO: 331, SEQ ID NO: 333, SEQ ID NO: 335, SEQ ID NO: 337, SEQ ID NO: 339, SEQ ID NO: 341, SEQ ID NO: 343, SEQ ID NO: 345, SEQ ID NO: 347, SEQ ID NO: 349, SEQ ID NO: 351, SEQ ID NO: 353, SEQ ID NO: 355, SEQ ID NO: 357, SEQ ID NO: 359, SEQ ID NO: 361, SEQ ID NO: 363, SEQ ID NO: 365, SEQ ID NO: 367, SEQ ID NO: 369, SEQ ID NO: 371, SEQ ID NO: 373, SEQ ID NO: 375, SEQ ID NO: 377, SEQ ID NO: 379, SEQ ID NO: 381, SEQ ID NO: 383, SEQ ID NO: 385, SEQ ID NO: 387, SEQ ID NO: 389, SEQ ID NO: 391, SEQ ID NO: 393, SEQ ID NO: 395, SEQ ID NO: 397, SEQ ID NO: 399, SEQ ID NO: 401, SEQ ID NO: 403, SEQ ID NO: 405, SEQ ID NO: 407, SEQ ID NO: 409, SEQ ID NO: 411, SEQ ID NO: 413, SEQ ID NO: 415, SEQ ID NO: 417, SEQ ID NO: 419, SEQ ID NO: 421, SEQ ID NO: 423, SEQ ID NO: 425, SEQ ID NO: 427, SEQ ID NO: 429, SEQ ID NO: 431, SEQ ID NO: 433, SEQ ID NO: 435, SEQ ID NO: 437, SEQ ID NO: 439, SEQ ID NO: 441, SEQ ID NO: 443, SEQ ID NO: 445, SEQ ID NO: 447, SEQ ID NO: 449, SEQ ID NO: 451, SEQ ID NO: 453, SEQ ID NO: 455, SEQ ID NO: 457, SEQ ID NO: 459, SEQ ID NO: 461, SEQ ID NO: 463, SEQ ID NO: 465, SEQ ID NO: 467, SEQ ID NO: 469, SEQ ID NO: 471, SEQ ID NO: 473, SEQ ID NO: 475, SEQ ID NO: 477, SEQ ID NO: 479, SEQ ID NO: 481, SEQ ID NO: 483, SEQ ID NO: 485, SEQ ID NO: 487, SEQ ID NO: 489, SEQ ID NO: 491, SEQ ID NO: 493, SEQ ID NO: 495, SEQ ID NO: 497, SEQ ID NO: 499, SEQ ID NO: 501, SEQ ID NO: 503, SEQ ID NO: 505, SEQ ID NO: 507, SEQ ID NO: 509, SEQ ID NO: 511, SEQ ID NO: 513, SEQ ID NO: 515, SEQ ID NO: 517, SEQ ID NO: 519, SEQ ID NO: 521, SEQ ID NO: 523, SEQ ID NO: 525, SEQ ID NO: 527, SEQ ID NO: 529, SEQ ID NO: 531, SEQ ID NO: 533, SEQ ID NO: 535, SEQ ID NO: 537, SEQ ID NO: 539, SEQ ID NO: 541, SEQ ID NO: 543, SEQ ID NO: 545, SEQ ID NO: 547, SEQ ID NO: 549, SEQ ID NO: 551, SEQ ID NO: 553, SEQ ID NO: 555, SEQ ID NO: 557, SEQ ID NO: 559, SEQ ID NO: 561, SEQ ID NO: 563, SEQ ID NO: 565, SEQ ID NO: 567, SEQ ID NO: 569, SEQ ID NO: 571, SEQ ID NO: 573, SEQ ID NO: 575, SEQ ID NO: 577, SEQ ID NO: 579, SEQ ID NO: 581, SEQ ID NO: 583, SEQ ID NO: 585, SEQ ID NO: 587, SEQ ID NO: 589, SEQ ID NO: 591, SEQ ID NO: 593, SEQ ID NO: 595, SEQ ID NO: 597, SEQ ID NO: 599, SEQ ID NO: 601, SEQ ID NO: 603, SEQ ID NO: 605, SEQ ID NO: 607, SEQ ID NO: 609, SEQ ID NO: 611, SEQ ID NO: 613, SEQ ID NO: 615, SEQ ID NO: 617, SEQ ID NO: 619, SEQ ID NO: 621, SEQ ID NO: 623, SEQ ID NO: 625, SEQ ID NO: 627, SEQ ID NO: 629, SEQ ID NO: 631, SEQ ID NO: 633, SEQ ID NO: 635, SEQ ID NO: 637, SEQ ID NO: 639, SEQ ID NO: 641, SEQ ID NO: 643, SEQ ID NO: 645, SEQ ID NO: 647, SEQ ID NO: 649, SEQ ID NO: 651, SEQ ID NO: 653, SEQ ID NO: 655, SEQ ID NO: 657, SEQ ID NO: 659, SEQ ID NO: 661, SEQ ID NO: 663, SEQ ID NO: 665, SEQ ID NO: 667, SEQ ID NO: 669, SEQ ID NO: 671, SEQ ID NO: 673, SEQ ID NO: 675, SEQ ID NO: 677, SEQ ID NO: 679, SEQ ID NO: 681, SEQ ID NO: 683, SEQ ID NO: 685, SEQ ID NO: 687, SEQ ID NO: 689, SEQ ID NO: 691, SEQ ID NO: 693, SEQ ID NO: 695, SEQ ID NO: 697, SEQ ID NO: 699, SEQ ID NO: 701, SEQ ID NO: 703, SEQ ID NO: 705, SEQ ID NO: 707, SEQ ID NO: 709, SEQ ID NO: 711, SEQ ID NO: 713, SEQ ID NO: 715, SEQ ID NO: 717, or SEQ ID NO: 719.

[0009] Also contemplated is a method of converting biomass substrates to a soluble sugar by combining a recombinant lignocellulose degradation enzyme made according to the invention with biomass substrates under conditions suitable for the production of the soluble sugar. In some embodiments the method includes the step of recovering the lignocellulose degradation enzyme from the medium in which the cell is cultured. In one aspect a composition comprising a recombinant lignocellulose degradation enzyme of the invention is provided.

[0010] In one aspect, the invention provides a method for producing soluble sugars from lignocellulose by contacting cellulosic biomass with a recombinant cell comprising a recombinant polynucleotide sequence that encodes a C1 lignocellulose degradation enzyme having an amino acid sequence selected from SEQ ID NO:2, SEQ ID NO: 4, SEQ ID NO: 6, SEQ ID NO: 8, SEQ ID NO: 10, SEQ ID NO: 12, SEQ ID NO: 14, SEQ ID NO: 16, SEQ ID NO: 18, SEQ ID NO: 20, SEQ ID NO: 22, SEQ ID NO: 24, SEQ ID NO: 26, SEQ ID NO: 28, SEQ ID NO: 30, SEQ ID NO: 32, SEQ ID NO: 34, SEQ ID NO: 36, SEQ ID NO: 38, SEQ ID NO: 40, SEQ ID NO: 42, SEQ ID NO: 44, SEQ ID NO: 46, SEQ ID NO: 48, SEQ ID NO: 50, SEQ ID NO: 52, SEQ ID NO: 54, SEQ ID NO: 56, SEQ ID NO: 58, SEQ ID NO: 60, SEQ ID NO: 62, SEQ ID NO: 64, SEQ ID NO: 66, SEQ ID NO: 68, SEQ ID NO: 70, SEQ ID NO: 72, SEQ ID NO: 74, SEQ ID NO: 76, SEQ ID NO: 78, SEQ ID NO: 80, SEQ ID NO: 82, SEQ ID NO: 84, SEQ ID NO: 86, SEQ ID NO: 88, SEQ ID NO: 90, SEQ ID NO: 92, SEQ ID NO: 94, SEQ ID NO: 96, SEQ ID NO: 98, SEQ ID NO: 100, SEQ ID NO: 102, SEQ ID NO: 104, SEQ ID NO: 106, SEQ ID NO: 108, SEQ ID NO: 110, SEQ ID NO: 112, SEQ ID NO: 114, SEQ ID NO: 116, SEQ ID NO: 118, SEQ ID NO: 120, SEQ ID NO: 122, SEQ ID NO: 124, SEQ ID NO: 126, SEQ ID NO: 128, SEQ ID NO: 130, SEQ ID NO: 132, SEQ ID NO: 134, SEQ ID NO: 136, SEQ ID NO: 138, SEQ ID NO: 140, SEQ ID NO: 142, SEQ ID NO: 144, SEQ ID NO: 146, SEQ ID NO: 148, SEQ ID NO: 150, SEQ ID NO: 152, SEQ ID NO: 154, SEQ ID NO: 156, SEQ ID NO: 158, SEQ ID NO: 160, SEQ ID NO: 162, SEQ ID NO: 164, SEQ ID NO: 166, SEQ ID NO: 168, SEQ ID NO: 170, SEQ ID NO: 172, SEQ ID NO: 174, SEQ ID NO: 176, or SEQ ID NO: 178; or an amino acid sequence selected from SEQ ID NO: 180, SEQ ID NO: 182, SEQ ID NO: 184, SEQ ID NO: 186, SEQ ID NO: 188, SEQ ID NO: 190, SEQ ID NO: 192, SEQ ID NO: 194, SEQ ID NO: 196, SEQ ID NO: 198, SEQ ID NO: 200, SEQ ID NO: 202, SEQ ID NO: 204, SEQ ID NO: 206, SEQ ID NO: 208, SEQ ID NO: 210, SEQ ID NO: 212, SEQ ID NO: 214, SEQ ID NO: 216, SEQ ID NO: 218, SEQ ID NO: 220, SEQ ID NO: 222, SEQ ID NO: 224, SEQ ID NO: 226, SEQ ID NO: 228, SEQ ID NO: 230, SEQ ID NO: 232, SEQ ID NO: 234, SEQ ID NO: 236, SEQ ID NO: 238, SEQ ID NO: 240, SEQ ID NO: 242, SEQ ID NO: 244, SEQ ID NO: 246, SEQ ID NO: 248, SEQ ID NO: 250, SEQ ID NO: 252, SEQ ID NO: 254, SEQ ID NO: 256, SEQ ID NO: 258, SEQ ID NO: 260, SEQ ID NO: 262, SEQ ID NO: 264, SEQ ID NO: 266, SEQ ID NO: 268, SEQ ID NO: 270, SEQ ID NO: 272, SEQ ID NO: 274, SEQ ID NO: 276, SEQ ID NO: 278, SEQ ID NO: 280, SEQ ID NO: 282, SEQ ID NO: 284, SEQ ID NO: 286, SEQ ID NO: 288, SEQ ID NO: 290, SEQ ID NO: 292, SEQ ID NO: 294, SEQ ID NO: 296, SEQ ID NO: 298, SEQ ID NO: 300, SEQ ID NO: 302, SEQ ID NO: 304, SEQ ID NO: 306, SEQ ID NO: 308, SEQ ID NO: 310, SEQ ID NO: 312, SEQ ID NO: 314, SEQ ID NO: 316, SEQ ID NO: 318, SEQ ID NO: 320, SEQ ID NO: 322, SEQ ID NO: 324, SEQ ID NO: 326, SEQ ID NO: 328, SEQ ID NO: 330, SEQ ID NO: 332, SEQ ID NO: 334, SEQ ID NO: 336, SEQ ID NO: 338, SEQ ID NO: 340, SEQ ID NO: 342, SEQ ID NO: 344, SEQ ID NO: 346, SEQ ID NO: 348, SEQ ID NO: 350, SEQ ID NO: 352, SEQ ID NO: 354, SEQ ID NO: 356, SEQ ID NO: 358, SEQ ID NO: 360, SEQ ID NO: 362, SEQ ID NO: 364, SEQ ID NO: 366, SEQ ID NO: 368, SEQ ID NO: 370, SEQ ID NO: 372, SEQ ID NO: 374, SEQ ID NO: 376, SEQ ID NO: 378, SEQ ID NO: 380, SEQ ID NO: 382, SEQ ID NO: 384, SEQ ID NO: 386, SEQ ID NO: 388, SEQ ID NO: 390, SEQ ID NO: 392, SEQ ID NO: 394, SEQ ID NO: 396, SEQ ID NO: 398, SEQ ID NO: 400, SEQ ID NO: 402, SEQ ID NO: 404, SEQ ID NO: 406, SEQ ID NO: 408, SEQ ID NO: 410, SEQ ID NO: 412, SEQ ID NO: 414, SEQ ID NO: 416, SEQ ID NO: 418, SEQ ID NO: 420, SEQ ID NO: 422, SEQ ID NO: 424, SEQ ID NO: 426, SEQ ID NO: 428, SEQ ID NO: 430, SEQ ID NO: 432, SEQ ID NO: 434, SEQ ID NO: 436, SEQ ID NO: 438, SEQ ID NO: 440, SEQ ID NO: 442, SEQ ID NO: 444, SEQ ID NO: 446, SEQ ID NO: 448, SEQ ID NO: 450, SEQ ID NO: 452, SEQ ID NO: 454, SEQ ID NO: 456, SEQ ID NO: 458, SEQ ID NO: 460, SEQ ID NO: 462, SEQ ID NO: 464, SEQ ID NO: 466, SEQ ID NO: 468, SEQ ID NO: 470, SEQ ID NO: 472, SEQ ID NO: 474, SEQ ID NO: 476, SEQ ID NO: 478, SEQ ID NO: 480, SEQ ID NO: 482, SEQ ID NO: 484, SEQ ID NO: 486, SEQ ID NO: 488, SEQ ID NO: 490, SEQ ID NO: 492, SEQ ID NO: 494, SEQ ID NO: 496, SEQ ID NO: 498, SEQ ID NO: 500, SEQ ID NO: 502, SEQ ID NO: 504, SEQ ID NO: 506, SEQ ID NO: 508, SEQ ID NO: 510, SEQ ID NO: 512, SEQ ID NO: 514, SEQ ID NO: 516, SEQ ID NO: 518, SEQ ID NO: 520, SEQ ID NO: 522, SEQ ID NO: 524, SEQ ID NO: 526, SEQ ID NO: 528, SEQ ID NO: 530, SEQ ID NO: 532, SEQ ID NO: 534, SEQ ID NO: 536, SEQ ID NO: 538, SEQ ID NO: 540, SEQ ID NO: 542, SEQ ID NO: 544, SEQ ID NO: 546, SEQ ID NO: 548, SEQ ID NO: 550, SEQ ID NO: 552, SEQ ID NO: 554, SEQ ID NO: 556, SEQ ID NO: 558, SEQ ID NO: 560, SEQ ID NO: 562, SEQ ID NO: 564, SEQ ID NO: 566, SEQ ID NO: 568, SEQ ID NO: 570, SEQ ID NO: 572, SEQ ID NO: 574, SEQ ID NO: 576, SEQ ID NO: 578, SEQ ID NO: 580, SEQ ID NO: 582, SEQ ID NO: 584, SEQ ID NO: 586, SEQ ID NO: 588, SEQ ID NO: 590, SEQ ID NO: 592, SEQ ID NO: 594, SEQ ID NO: 596, SEQ ID NO: 598, SEQ ID NO: 600, SEQ ID NO: 602, SEQ ID NO: 604, SEQ ID NO: 606, SEQ ID NO: 608, SEQ ID NO: 610, SEQ ID NO: 612, SEQ ID NO: 614, SEQ ID NO: 616, SEQ ID NO: 618, SEQ ID NO: 620, SEQ ID NO: 622, SEQ ID NO: 624, SEQ ID NO: 626, SEQ ID NO: 628, SEQ ID NO: 630, SEQ ID NO: 632, SEQ ID NO: 634, SEQ ID NO: 636, SEQ ID NO: 638, SEQ ID NO: 640, SEQ ID NO: 642, SEQ ID NO: 644, SEQ ID NO: 646, SEQ ID NO: 648, SEQ ID NO: 650, SEQ ID NO: 652, SEQ ID NO: 654, SEQ ID NO: 656, SEQ ID NO: 658, SEQ ID NO: 660, SEQ ID NO: 662, SEQ ID NO: 664, SEQ ID NO: 666, SEQ ID NO: 668, SEQ ID NO: 670, SEQ ID NO: 672, SEQ ID NO: 674, SEQ ID NO: 676, SEQ ID NO: 678, SEQ ID NO: 680, SEQ ID NO: 682, SEQ ID NO: 684, SEQ ID NO: 686, SEQ ID NO: 688, SEQ ID NO: 690, SEQ ID NO: 692, SEQ ID NO: 694, SEQ ID NO: 696, SEQ ID NO: 698, SEQ ID NO: 700, SEQ ID NO: 702, SEQ ID NO: 704, SEQ ID NO: 706, SEQ ID NO: 708, SEQ ID NO: 710, SEQ ID NO: 712, SEQ ID NO: 714, SEQ ID NO: 716, SEQ ID NO: 718, or SEQ ID NO: 720; and where the polynucleotide sequence is operably linked to a promoter under conditions in which the enzyme is expressed and secreted by the cell and said cellulosic biomass is enzymatically converted using the lignocellulose degradation enzyme to a degradation product that produces soluble sugar. In some embodiments, the promoter is a heterologous promoter. In some embodiments, multiple copies of the polynucleotide sequence may be operably linked to a promoter. In some embodiments, the lignocellulose degradation enzyme comprises a fragment that is less than the full-length of a polypeptide identified in Table 2. In some embodiments, the fragment comprises a number of contiguous amino acid residues of the sequence that is at least the number shown in Column 4 and less than the length shown in column 3 for that sequence. In some embodiments, the fragment comprises a number of contiguous amino acid residues of the sequence that is from 20 to 30 residues less than the number shown in Column 3. In some embodiments, the polypeptide comprises a lignocellulose degradation enzyme polypeptide that consists of an amino acid sequence set forth in Table 2. Optionally, the polynucleotide encoding the lignocellulose degradation enzyme has a nucleic acid sequence selected from SEQ ID NO: 1, SEQ ID NO: 3, SEQ ID NO: 5, SEQ ID NO: 7, SEQ ID NO: 9, SEQ ID NO: 11, SEQ ID NO: 13, SEQ ID NO: 15, SEQ ID NO: 17, SEQ ID NO: 19, SEQ ID NO: 21, SEQ ID NO: 23, SEQ ID NO: 25, SEQ ID NO: 27, SEQ ID NO: 29, SEQ ID NO: 31, SEQ ID NO: 33, SEQ ID NO: 35, SEQ ID NO: 37, SEQ ID NO: 39, SEQ ID NO: 41, SEQ ID NO: 43, SEQ ID NO: 45, SEQ ID NO: 47, SEQ ID NO: 49, SEQ ID NO: 51, SEQ ID NO: 53, SEQ ID NO: 55, SEQ ID NO: 57, SEQ ID NO: 59, SEQ ID NO: 61, SEQ ID NO: 63, SEQ ID NO: 65, SEQ ID NO: 67, SEQ ID NO: 69, SEQ ID NO: 71, SEQ ID NO: 73, SEQ ID NO: 75, SEQ ID NO: 77, SEQ ID NO: 79, SEQ ID NO: 81, SEQ ID NO: 83, SEQ ID NO: 85, SEQ ID NO: 87, SEQ ID NO: 89, SEQ ID NO: 91, SEQ ID NO: 93, SEQ ID NO: 95, SEQ ID NO: 97, SEQ ID NO: 99, SEQ ID NO: 101, SEQ ID NO: 103, SEQ ID NO: 105, SEQ ID NO: 107, SEQ ID NO: 109, SEQ ID NO: 111, SEQ ID NO: 113, SEQ ID NO: 115, SEQ ID NO: 117, SEQ ID NO: 119, SEQ ID NO: 121, SEQ ID NO: 123, SEQ ID NO: 125, SEQ ID NO: 127, SEQ ID NO: 129, SEQ ID NO: 131, SEQ ID NO: 133, SEQ ID NO: 135, SEQ ID NO: 137, SEQ ID NO: 139, SEQ ID NO: 141, SEQ ID NO: 143, SEQ ID NO: 145, SEQ ID NO: 147, SEQ ID NO: 149, SEQ ID NO: 151, SEQ ID NO: 153, SEQ ID NO: 155, SEQ ID NO: 157, SEQ ID NO: 159, SEQ ID NO: 161, SEQ ID NO: 163, SEQ ID NO: 165, SEQ ID NO: 167, SEQ ID NO: 169, SEQ ID NO: 171, SEQ ID NO: 173, SEQ ID NO: 175, or SEQ ID NO: 177; or a nucleic acid sequence selected from SEQ ID NO: 179, SEQ ID NO: 181, SEQ ID NO: 183, SEQ ID NO: 185, SEQ ID NO: 187, SEQ ID NO: 189, SEQ ID NO: 191, SEQ ID NO: 193, SEQ ID NO: 195, SEQ ID NO: 197, SEQ ID NO: 199, SEQ ID NO: 201, SEQ ID NO: 203, SEQ ID NO: 205, SEQ ID NO: 207, SEQ ID NO: 209, SEQ ID NO: 211, SEQ ID NO: 213, SEQ ID NO: 215, SEQ ID NO: 217, SEQ ID NO: 219, SEQ ID NO: 221, SEQ ID NO: 223, SEQ ID NO: 225, SEQ ID NO: 227, SEQ ID NO: 229, SEQ ID NO: 231, SEQ ID NO: 233, SEQ ID NO: 235, SEQ ID NO: 237, SEQ ID NO: 239, SEQ ID NO: 241, SEQ ID NO: 243, SEQ ID NO: 245, SEQ ID NO: 247, SEQ ID NO: 249, SEQ ID NO: 251, SEQ ID NO: 253, SEQ ID NO: 255, SEQ ID NO: 257, SEQ ID NO: 259, SEQ ID NO: 261, SEQ ID NO: 263, SEQ ID NO: 265, SEQ ID NO: 267, SEQ ID NO: 269, SEQ ID NO: 271, SEQ ID NO: 273, SEQ ID NO: 275, SEQ ID NO: 277, SEQ ID NO: 279, SEQ ID NO: 281, SEQ ID NO: 283, SEQ ID NO: 285, SEQ ID NO: 287, SEQ ID NO: 289, SEQ ID NO: 291, SEQ ID NO: 293, SEQ ID NO: 295, SEQ ID NO: 297, SEQ ID NO: 299, SEQ ID NO: 301, SEQ ID NO: 303, SEQ ID NO: 305, SEQ ID NO: 307, SEQ ID NO: 309, SEQ ID NO: 311, SEQ ID NO: 313, SEQ ID NO: 315, SEQ ID NO: 317, SEQ ID NO: 319, SEQ ID NO: 321, SEQ ID NO: 323, SEQ ID NO: 325, SEQ ID NO: 327, SEQ ID NO: 329, SEQ ID NO: 331, SEQ ID NO: 333, SEQ ID NO: 335, SEQ ID NO: 337, SEQ ID NO: 339, SEQ ID NO: 341, SEQ ID NO: 343, SEQ ID NO: 345, SEQ ID NO: 347, SEQ ID NO: 349, SEQ ID NO: 351, SEQ ID NO: 353, SEQ ID NO: 355, SEQ ID NO: 357, SEQ ID NO: 359, SEQ ID NO: 361, SEQ ID NO: 363, SEQ ID NO: 365, SEQ ID NO: 367, SEQ ID NO: 369, SEQ ID NO: 371, SEQ ID NO: 373, SEQ ID NO: 375, SEQ ID NO: 377, SEQ ID NO: 379, SEQ ID NO: 381, SEQ ID NO: 383, SEQ ID NO: 385, SEQ ID NO: 387, SEQ ID NO: 389, SEQ ID NO: 391, SEQ ID NO: 393, SEQ ID NO: 395, SEQ ID NO: 397, SEQ ID NO: 399, SEQ ID NO: 401, SEQ ID NO: 403, SEQ ID NO: 405, SEQ ID NO: 407, SEQ ID NO: 409, SEQ ID NO: 411, SEQ ID NO: 413, SEQ ID NO: 415, SEQ ID NO: 417, SEQ ID NO: 419, SEQ ID NO: 421, SEQ ID NO: 423, SEQ ID NO: 425, SEQ ID NO: 427, SEQ ID NO: 429, SEQ ID NO: 431, SEQ ID NO: 433, SEQ ID NO: 435, SEQ ID NO: 437, SEQ ID NO: 439, SEQ ID NO: 441, SEQ ID NO: 443, SEQ ID NO: 445, SEQ ID NO: 447, SEQ ID NO: 449, SEQ ID NO: 451, SEQ ID NO: 453, SEQ ID NO: 455, SEQ ID NO: 457, SEQ ID NO: 459, SEQ ID NO: 461, SEQ ID NO: 463, SEQ ID NO: 465, SEQ ID NO: 467, SEQ ID NO: 469, SEQ ID NO: 471, SEQ ID NO: 473, SEQ ID NO: 475, SEQ ID NO: 477, SEQ ID NO: 479, SEQ ID NO: 481, SEQ ID NO: 483, SEQ ID NO: 485, SEQ ID NO: 487, SEQ ID NO: 489, SEQ ID NO: 491, SEQ ID NO: 493, SEQ ID NO: 495, SEQ ID NO: 497, SEQ ID NO: 499, SEQ ID NO: 501, SEQ ID NO: 503, SEQ ID NO: 505, SEQ ID NO: 507, SEQ ID NO: 509, SEQ ID NO: 511, SEQ ID NO: 513, SEQ ID NO: 515, SEQ ID NO: 517, SEQ ID NO: 519, SEQ ID NO: 521, SEQ ID NO: 523, SEQ ID NO: 525, SEQ ID NO: 527, SEQ ID NO: 529, SEQ ID NO: 531, SEQ ID NO: 533, SEQ ID NO: 535, SEQ ID NO: 537, SEQ ID NO: 539, SEQ ID NO: 541, SEQ ID NO: 543, SEQ ID NO: 545, SEQ ID NO: 547, SEQ ID NO: 549, SEQ ID NO: 551, SEQ ID NO: 553, SEQ ID NO: 555, SEQ ID NO: 557, SEQ ID NO: 559, SEQ ID NO: 561, SEQ ID NO: 563, SEQ ID NO: 565, SEQ ID NO: 567, SEQ ID NO: 569, SEQ ID NO: 571, SEQ ID NO: 573, SEQ ID NO: 575, SEQ ID NO: 577, SEQ ID NO: 579, SEQ ID NO: 581, SEQ ID NO: 583, SEQ ID NO: 585, SEQ ID NO: 587, SEQ ID NO: 589, SEQ ID NO: 591, SEQ ID NO: 593, SEQ ID NO: 595, SEQ ID NO: 597, SEQ ID NO: 599, SEQ ID NO: 601, SEQ ID NO: 603, SEQ ID NO: 605, SEQ ID NO: 607, SEQ ID NO: 609, SEQ ID NO: 611, SEQ ID NO: 613, SEQ ID NO: 615, SEQ ID NO: 617, SEQ ID NO: 619, SEQ ID NO: 621, SEQ ID NO: 623, SEQ ID NO: 625, SEQ ID NO: 627, SEQ ID NO: 629, SEQ ID NO: 631, SEQ ID NO: 633, SEQ ID NO: 635, SEQ ID NO: 637, SEQ ID NO: 639, SEQ ID NO: 641, SEQ ID NO: 643, SEQ ID NO: 645, SEQ ID NO: 647, SEQ ID NO: 649, SEQ ID NO: 651, SEQ ID NO: 653, SEQ ID NO: 655, SEQ ID NO: 657, SEQ ID NO: 659, SEQ ID NO: 661, SEQ ID NO: 663, SEQ ID NO: 665, SEQ ID NO: 667, SEQ ID NO: 669, SEQ ID NO: 671, SEQ ID NO: 673, SEQ ID NO: 675, SEQ ID NO: 677, SEQ ID NO: 679, SEQ ID NO: 681, SEQ ID NO: 683, SEQ ID NO: 685, SEQ ID NO: 687, SEQ ID NO: 689, SEQ ID NO: 691, SEQ ID NO: 693, SEQ ID NO: 695, SEQ ID NO: 697, SEQ ID NO: 699, SEQ ID NO: 701, SEQ ID NO: 703, SEQ ID NO: 705, SEQ ID NO: 707, SEQ ID NO: 709, SEQ ID NO: 711, SEQ ID NO: 713, SEQ ID NO: 715, SEQ ID NO: 717, or SEQ ID NO: 719.

[0011] In some embodiments of these methods the cell is a C1 cell and/or the heterologous promoter is a C1 promoter.

[0012] In one aspect, the invention provides a recombinant host cell comprising a recombinant polynucleotide sequence encoding a C1 lignocellulose degradation enzyme comprising an amino acid sequence selected from SEQ ID NO:2, SEQ ID NO: 4, SEQ ID NO: 6, SEQ ID NO: 8, SEQ ID NO: 10, SEQ ID NO: 12, SEQ ID NO: 14, SEQ ID NO: 16, SEQ ID NO: 18, SEQ ID NO: 20, SEQ ID NO: 22, SEQ ID NO: 24, SEQ ID NO: 26, SEQ ID NO: 28, SEQ ID NO: 30, SEQ ID NO: 32, SEQ ID NO: 34, SEQ ID NO: 36, SEQ ID NO: 38, SEQ ID NO: 40, SEQ ID NO: 42, SEQ ID NO: 44, SEQ ID NO: 46, SEQ ID NO: 48, SEQ ID NO: 50, SEQ ID NO: 52, SEQ ID NO: 54, SEQ ID NO: 56, SEQ ID NO: 58, SEQ ID NO: 60, SEQ ID NO: 62, SEQ ID NO: 64, SEQ ID NO: 66, SEQ ID NO: 68, SEQ ID NO: 70, SEQ ID NO: 72, SEQ ID NO: 74, SEQ ID NO: 76, SEQ ID NO: 78, SEQ ID NO: 80, SEQ ID NO: 82, SEQ ID NO: 84, SEQ ID NO: 86, SEQ ID NO: 88, SEQ ID NO: 90, SEQ ID NO: 92, SEQ ID NO: 94, SEQ ID NO: 96, SEQ ID NO: 98, SEQ ID NO: 100, SEQ ID NO: 102, SEQ ID NO: 104, SEQ ID NO: 106, SEQ ID NO: 108, SEQ ID NO: 110, SEQ ID NO: 112, SEQ ID NO: 114, SEQ ID NO: 116, SEQ ID NO: 118, SEQ ID NO: 120, SEQ ID NO: 122, SEQ ID NO: 124, SEQ ID NO: 126, SEQ ID NO: 128, SEQ ID NO: 130, SEQ ID NO: 132, SEQ ID NO: 134, SEQ ID NO: 136, SEQ ID NO: 138, SEQ ID NO: 140, SEQ ID NO: 142, SEQ ID NO: 144, SEQ ID NO: 146, SEQ ID NO: 148, SEQ ID NO: 150, SEQ ID NO: 152, SEQ ID NO: 154, SEQ ID NO: 156, SEQ ID NO: 158, SEQ ID NO: 160, SEQ ID NO: 162, SEQ ID NO: 164, SEQ ID NO: 166, SEQ ID NO: 168, SEQ ID NO: 170, SEQ ID NO: 172, SEQ ID NO: 174, SEQ ID NO: 176, or SEQ ID NO: 178; or an amino acid sequence selected from SEQ ID NO: 180, SEQ ID NO: 182, SEQ ID NO: 184, SEQ ID NO: 186, SEQ ID NO: 188, SEQ ID NO: 190, SEQ ID NO: 192, SEQ ID NO: 194, SEQ ID NO: 196, SEQ ID NO: 198, SEQ ID NO: 200, SEQ ID NO: 202, SEQ ID NO: 204, SEQ ID NO: 206, SEQ ID NO: 208, SEQ ID NO: 210, SEQ ID NO: 212, SEQ ID NO: 214, SEQ ID NO: 216, SEQ ID NO: 218, SEQ ID NO: 220, SEQ ID NO: 222, SEQ ID NO: 224, SEQ ID NO: 226, SEQ ID NO: 228, SEQ ID NO: 230, SEQ ID NO: 232, SEQ ID NO: 234, SEQ ID NO: 236, SEQ ID NO: 238, SEQ ID NO: 240, SEQ ID NO: 242, SEQ ID NO: 244, SEQ ID NO: 246, SEQ ID NO: 248, SEQ ID NO: 250, SEQ ID NO: 252, SEQ ID NO: 254, SEQ ID NO: 256, SEQ ID NO: 258, SEQ ID NO: 260, SEQ ID NO: 262, SEQ ID NO: 264, SEQ ID NO: 266, SEQ ID NO: 268, SEQ ID NO: 270, SEQ ID NO: 272, SEQ ID NO: 274, SEQ ID NO: 276, SEQ ID NO: 278, SEQ ID NO: 280, SEQ ID NO: 282, SEQ ID NO: 284, SEQ ID NO: 286, SEQ ID NO: 288, SEQ ID NO: 290, SEQ ID NO: 292, SEQ ID NO: 294, SEQ ID NO: 296, SEQ ID NO: 298, SEQ ID NO: 300, SEQ ID NO: 302, SEQ ID NO: 304, SEQ ID NO: 306, SEQ ID NO: 308, SEQ ID NO: 310, SEQ ID NO: 312, SEQ ID NO: 314, SEQ ID NO: 316, SEQ ID NO: 318, SEQ ID NO: 320, SEQ ID NO: 322, SEQ ID NO: 324, SEQ ID NO: 326, SEQ ID NO: 328, SEQ ID NO: 330, SEQ ID NO: 332, SEQ ID NO: 334, SEQ ID NO: 336, SEQ ID NO: 338, SEQ ID NO: 340, SEQ ID NO: 342, SEQ ID NO: 344, SEQ ID NO: 346, SEQ ID NO: 348, SEQ ID NO: 350, SEQ ID NO: 352, SEQ ID NO: 354, SEQ ID NO: 356, SEQ ID NO: 358, SEQ ID NO: 360, SEQ ID NO: 362, SEQ ID NO: 364, SEQ ID NO: 366, SEQ ID NO: 368, SEQ ID NO: 370, SEQ ID NO: 372, SEQ ID NO: 374, SEQ ID NO: 376, SEQ ID NO: 378, SEQ ID NO: 380, SEQ ID NO: 382, SEQ ID NO: 384, SEQ ID NO: 386, SEQ ID NO: 388, SEQ ID NO: 390, SEQ ID NO: 392, SEQ ID NO: 394, SEQ ID NO: 396, SEQ ID NO: 398, SEQ ID NO: 400, SEQ ID NO: 402, SEQ ID NO: 404, SEQ ID NO: 406, SEQ ID NO: 408, SEQ ID NO: 410, SEQ ID NO: 412, SEQ ID NO: 414, SEQ ID NO: 416, SEQ ID NO: 418, SEQ ID NO: 420, SEQ ID NO: 422, SEQ ID NO: 424, SEQ ID NO: 426, SEQ ID NO: 428, SEQ ID NO: 430, SEQ ID NO: 432, SEQ ID NO: 434, SEQ ID NO: 436, SEQ ID NO: 438, SEQ ID NO: 440, SEQ ID NO: 442, SEQ ID NO: 444, SEQ ID NO: 446, SEQ ID NO: 448, SEQ ID NO: 450, SEQ ID NO: 452, SEQ ID NO: 454, SEQ ID NO: 456, SEQ ID NO: 458, SEQ ID NO: 460, SEQ ID NO: 462, SEQ ID NO: 464, SEQ ID NO: 466, SEQ ID NO: 468, SEQ ID NO: 470, SEQ ID NO: 472, SEQ ID NO: 474, SEQ ID NO: 476, SEQ ID NO: 478, SEQ ID NO: 480, SEQ ID NO: 482, SEQ ID NO: 484, SEQ ID NO: 486, SEQ ID NO: 488, SEQ ID NO: 490, SEQ ID NO: 492, SEQ ID NO: 494, SEQ ID NO: 496, SEQ ID NO: 498, SEQ ID NO: 500, SEQ ID NO: 502, SEQ ID NO: 504, SEQ ID NO: 506, SEQ ID NO: 508, SEQ ID NO: 510, SEQ ID NO: 512, SEQ ID NO: 514, SEQ ID NO: 516, SEQ ID NO: 518, SEQ ID NO: 520, SEQ ID NO: 522, SEQ ID NO: 524, SEQ ID NO: 526, SEQ ID NO: 528, SEQ ID NO: 530, SEQ ID NO: 532, SEQ ID NO: 534, SEQ ID NO: 536, SEQ ID NO: 538, SEQ ID NO: 540, SEQ ID NO: 542, SEQ ID NO: 544, SEQ ID NO: 546, SEQ ID NO: 548, SEQ ID NO: 550, SEQ ID NO: 552, SEQ ID NO: 554, SEQ ID NO: 556, SEQ ID NO: 558, SEQ ID NO: 560, SEQ ID NO: 562, SEQ ID NO: 564, SEQ ID NO: 566, SEQ ID NO: 568, SEQ ID NO: 570, SEQ ID NO: 572, SEQ ID NO: 574, SEQ ID NO: 576, SEQ ID NO: 578, SEQ ID NO: 580, SEQ ID NO: 582, SEQ ID NO: 584, SEQ ID NO: 586, SEQ ID NO: 588, SEQ ID NO: 590, SEQ ID NO: 592, SEQ ID NO: 594, SEQ ID NO: 596, SEQ ID NO: 598, SEQ ID NO: 600, SEQ ID NO: 602, SEQ ID NO: 604, SEQ ID NO: 606, SEQ ID NO: 608, SEQ ID NO: 610, SEQ ID NO: 612, SEQ ID NO: 614, SEQ ID NO: 616, SEQ ID NO: 618, SEQ ID NO: 620, SEQ ID NO: 622, SEQ ID NO: 624, SEQ ID NO: 626, SEQ ID NO: 628, SEQ ID NO: 630, SEQ ID NO: 632, SEQ ID NO: 634, SEQ ID NO: 636, SEQ ID NO: 638, SEQ ID NO: 640, SEQ ID NO: 642, SEQ ID NO: 644, SEQ ID NO: 646, SEQ ID NO: 648, SEQ ID NO: 650, SEQ ID NO: 652, SEQ ID NO: 654, SEQ ID NO: 656, SEQ ID NO: 658, SEQ ID NO: 660, SEQ ID NO: 662, SEQ ID NO: 664, SEQ ID NO: 666, SEQ ID NO: 668, SEQ ID NO: 670, SEQ ID NO: 672, SEQ ID NO: 674, SEQ ID NO: 676, SEQ ID NO: 678, SEQ ID NO: 680, SEQ ID NO: 682, SEQ ID NO: 684, SEQ ID NO: 686, SEQ ID NO: 688, SEQ ID NO: 690, SEQ ID NO: 692, SEQ ID NO: 694, SEQ ID NO: 696, SEQ ID NO: 698, SEQ ID NO: 700, SEQ ID NO: 702, SEQ ID NO: 704, SEQ ID NO: 706, SEQ ID NO: 708, SEQ ID NO: 710, SEQ ID NO: 712, SEQ ID NO: 714, SEQ ID NO: 716, SEQ ID NO: 718, or SEQ ID NO: 720; operably linked to a promoter, optionally a heterologous promoter. In some embodiments, the lignocellulose degradation enzyme comprises a fragment that is less than the full-length of a polypeptide identified in Table 2. In some embodiments, the fragment comprises a number of contiguous amino acid residues of the sequence that is at least the number shown in Column 4 and less than the length shown in column 3 for that sequence. In some embodiments, the fragment comprises a number of contiguous amino acid residues of the sequence that is from 20 to 30 residues fewer in length than the number shown in Column 3. In some embodiments, the polypeptide comprises a lignocellulose degradation enzyme polypeptide that consists of an amino acid sequence set forth in Table 2. Optionally, the recombinant polynucleotide has a nucleic acid sequence selected from SEQ ID NO: 1, SEQ ID NO: 3, SEQ ID NO: 5, SEQ ID NO: 7, SEQ ID NO: 9, SEQ ID NO: 11, SEQ ID NO: 13, SEQ ID NO: 15, SEQ ID NO: 17, SEQ ID NO: 19, SEQ ID NO: 21, SEQ ID NO: 23, SEQ ID NO: 25, SEQ ID NO: 27, SEQ ID NO: 29, SEQ ID NO: 31, SEQ ID NO: 33, SEQ ID NO: 35, SEQ ID NO: 37, SEQ ID NO: 39, SEQ ID NO: 41, SEQ ID NO: 43, SEQ ID NO: 45, SEQ ID NO: 47, SEQ ID NO: 49, SEQ ID NO: 51, SEQ ID NO: 53, SEQ ID NO: 55, SEQ ID NO: 57, SEQ ID NO: 59, SEQ ID NO: 61, SEQ ID NO: 63, SEQ ID NO: 65, SEQ ID NO: 67, SEQ ID NO: 69, SEQ ID NO: 71, SEQ ID NO: 73, SEQ ID NO: 75, SEQ ID NO: 77, SEQ ID NO: 79, SEQ ID NO: 81, SEQ ID NO: 83, SEQ ID NO: 85, SEQ ID NO: 87, SEQ ID NO: 89, SEQ ID NO: 91, SEQ ID NO: 93, SEQ ID NO: 95, SEQ ID NO: 97, SEQ ID NO: 99, SEQ ID NO: 101, SEQ ID NO: 103, SEQ ID NO: 105, SEQ ID NO: 107, SEQ ID NO: 109, SEQ ID NO: 111, SEQ ID NO: 113, SEQ ID NO: 115, SEQ ID NO: 117, SEQ ID NO: 119, SEQ ID NO: 121, SEQ ID NO: 123, SEQ ID NO: 125, SEQ ID NO: 127, SEQ ID NO: 129, SEQ ID NO: 131, SEQ ID NO: 133, SEQ ID NO: 135, SEQ ID NO: 137, SEQ ID NO: 139, SEQ ID NO: 141, SEQ ID NO: 143, SEQ ID NO: 145, SEQ ID NO: 147, SEQ ID NO: 149, SEQ ID NO: 151, SEQ ID NO: 153, SEQ ID NO: 155, SEQ ID NO: 157, SEQ ID NO: 159, SEQ ID NO: 161, SEQ ID NO: 163, SEQ ID NO: 165, SEQ ID NO: 167, SEQ ID NO: 169, SEQ ID NO: 171, SEQ ID NO: 173, SEQ ID NO: 175, or SEQ ID NO: 177; or a nucleic acid sequence selected from SEQ ID NO: 179, SEQ ID NO: 181, SEQ ID NO: 183, SEQ ID NO: 185, SEQ ID NO: 187, SEQ ID NO: 189, SEQ ID NO: 191, SEQ ID NO: 193, SEQ ID NO: 195, SEQ ID NO: 197, SEQ ID NO: 199, SEQ ID NO: 201, SEQ ID NO: 203, SEQ ID NO: 205, SEQ ID NO: 207, SEQ ID NO: 209, SEQ ID NO: 211, SEQ ID NO: 213, SEQ ID NO: 215, SEQ ID NO: 217, SEQ ID NO: 219, SEQ ID NO: 221, SEQ ID NO: 223, SEQ ID NO: 225, SEQ ID NO: 227, SEQ ID NO: 229, SEQ ID NO: 231, SEQ ID NO: 233, SEQ ID NO: 235, SEQ ID NO: 237, SEQ ID NO: 239, SEQ ID NO: 241, SEQ ID NO: 243, SEQ ID NO: 245, SEQ ID NO: 247, SEQ ID NO: 249, SEQ ID NO: 251, SEQ ID NO: 253, SEQ ID NO: 255, SEQ ID NO: 257, SEQ ID NO: 259, SEQ ID NO: 261, SEQ ID NO: 263, SEQ ID NO: 265, SEQ ID NO: 267, SEQ ID NO: 269, SEQ ID NO: 271, SEQ ID NO: 273, SEQ ID NO: 275, SEQ ID NO: 277, SEQ ID NO: 279, SEQ ID NO: 281, SEQ ID NO: 283, SEQ ID NO: 285, SEQ ID NO: 287, SEQ ID NO: 289, SEQ ID NO: 291, SEQ ID NO: 293, SEQ ID NO: 295, SEQ ID NO: 297, SEQ ID NO: 299, SEQ ID NO: 301, SEQ ID NO: 303, SEQ ID NO: 305, SEQ ID NO: 307, SEQ ID NO: 309, SEQ ID NO: 311, SEQ ID NO: 313, SEQ ID NO: 315, SEQ ID NO: 317, SEQ ID NO: 319, SEQ ID NO: 321, SEQ ID NO: 323, SEQ ID NO: 325, SEQ ID NO: 327, SEQ ID NO: 329, SEQ ID NO: 331, SEQ ID NO: 333, SEQ ID NO: 335, SEQ ID NO: 337, SEQ ID NO: 339, SEQ ID NO: 341, SEQ ID NO: 343, SEQ ID NO: 345, SEQ ID NO: 347, SEQ ID NO: 349, SEQ ID NO: 351, SEQ ID NO: 353, SEQ ID NO: 355, SEQ ID NO: 357, SEQ ID NO: 359, SEQ ID NO: 361, SEQ ID NO: 363, SEQ ID NO: 365, SEQ ID NO: 367, SEQ ID NO: 369, SEQ ID NO: 371, SEQ ID NO: 373, SEQ ID NO: 375, SEQ ID NO: 377, SEQ ID NO: 379, SEQ ID NO: 381, SEQ ID NO: 383, SEQ ID NO: 385, SEQ ID NO: 387, SEQ ID NO: 389, SEQ ID NO: 391, SEQ ID NO: 393, SEQ ID NO: 395, SEQ ID NO: 397, SEQ ID NO: 399, SEQ ID NO: 401, SEQ ID NO: 403, SEQ ID NO: 405, SEQ ID NO: 407, SEQ ID NO: 409, SEQ ID NO: 411, SEQ ID NO: 413, SEQ ID NO: 415, SEQ ID NO: 417, SEQ ID NO: 419, SEQ ID NO: 421, SEQ ID NO: 423, SEQ ID NO: 425, SEQ ID NO: 427, SEQ ID NO: 429, SEQ ID NO: 431, SEQ ID NO: 433, SEQ ID NO: 435, SEQ ID NO: 437, SEQ ID NO: 439, SEQ ID NO: 441, SEQ ID NO: 443, SEQ ID NO: 445, SEQ ID NO: 447, SEQ ID NO: 449, SEQ ID NO: 451, SEQ ID NO: 453, SEQ ID NO: 455, SEQ ID NO: 457, SEQ ID NO: 459, SEQ ID NO: 461, SEQ ID NO: 463, SEQ ID NO: 465, SEQ ID NO: 467, SEQ ID NO: 469, SEQ ID NO: 471, SEQ ID NO: 473, SEQ ID NO: 475, SEQ ID NO: 477, SEQ ID NO: 479, SEQ ID NO: 481, SEQ ID NO: 483, SEQ ID NO: 485, SEQ ID NO: 487, SEQ ID NO: 489, SEQ ID NO: 491, SEQ ID NO: 493, SEQ ID NO: 495, SEQ ID NO: 497, SEQ ID NO: 499, SEQ ID NO: 501, SEQ ID NO: 503, SEQ ID NO: 505, SEQ ID NO: 507, SEQ ID NO: 509, SEQ ID NO: 511, SEQ ID NO: 513, SEQ ID NO: 515, SEQ ID NO: 517, SEQ ID NO: 519, SEQ ID NO: 521, SEQ ID NO: 523, SEQ ID NO: 525, SEQ ID NO: 527, SEQ ID NO: 529, SEQ ID NO: 531, SEQ ID NO: 533, SEQ ID NO: 535, SEQ ID NO: 537, SEQ ID NO: 539, SEQ ID NO: 541, SEQ ID NO: 543, SEQ ID NO: 545, SEQ ID NO: 547, SEQ ID NO: 549, SEQ ID NO: 551, SEQ ID NO: 553, SEQ ID NO: 555, SEQ ID NO: 557, SEQ ID NO: 559, SEQ ID NO: 561, SEQ ID NO: 563, SEQ ID NO: 565, SEQ ID NO: 567, SEQ ID NO: 569, SEQ ID NO: 571, SEQ ID NO: 573, SEQ ID NO: 575, SEQ ID NO: 577, SEQ ID NO: 579, SEQ ID NO: 581, SEQ ID NO: 583, SEQ ID NO: 585, SEQ ID NO: 587, SEQ ID NO: 589, SEQ ID NO: 591, SEQ ID NO: 593, SEQ ID NO: 595, SEQ ID NO: 597, SEQ ID NO: 599, SEQ ID NO: 601, SEQ ID NO: 603, SEQ ID NO: 605, SEQ ID NO: 607, SEQ ID NO: 609, SEQ ID NO: 611, SEQ ID NO: 613, SEQ ID NO: 615, SEQ ID NO: 617, SEQ ID NO: 619, SEQ ID NO: 621, SEQ ID NO: 623, SEQ ID NO: 625, SEQ ID NO: 627, SEQ ID NO: 629, SEQ ID NO: 631, SEQ ID NO: 633, SEQ ID NO: 635, SEQ ID NO: 637, SEQ ID NO: 639, SEQ ID NO: 641, SEQ ID NO: 643, SEQ ID NO: 645, SEQ ID NO: 647, SEQ ID NO: 649, SEQ ID NO: 651, SEQ ID NO: 653, SEQ ID NO: 655, SEQ ID NO: 657, SEQ ID NO: 659, SEQ ID NO: 661, SEQ ID NO: 663, SEQ ID NO: 665, SEQ ID NO: 667, SEQ ID NO: 669, SEQ ID NO: 671, SEQ ID NO: 673, SEQ ID NO: 675, SEQ ID NO: 677, SEQ ID NO: 679, SEQ ID NO: 681, SEQ ID NO: 683, SEQ ID NO: 685, SEQ ID NO: 687, SEQ ID NO: 689, SEQ ID NO: 691, SEQ ID NO: 693, SEQ ID NO: 695, SEQ ID NO: 697, SEQ ID NO: 699, SEQ ID NO: 701, SEQ ID NO: 703, SEQ ID NO: 705, SEQ ID NO: 707, SEQ ID NO: 709, SEQ ID NO: 711, SEQ ID NO: 713, SEQ ID NO: 715, SEQ ID NO: 717, or SEQ ID NO: 719. In one embodiment the recombinant host cell expresses at least one other recombinant lignocellulose degradation enzyme, e.g., a cellulase enzyme or other enzyme involved in lignocellulose degradation. Also contemplated is a method of converting a biomass substrate to a soluble sugar, by combining the expression product from the recombinant cell with the biomass substrate under conditions suitable for the production of the soluble sugar.

[0013] In a further aspect, the invention provides a composition comprising a lignocellulose degradation enzyme having an amino acid sequence selected from the group of glycoside hydrolase amino acid sequences set forth in Table 1 or Table 2, and a cellulase, wherein the amino acid sequence of the cellulase is different from the glycoside hydrolase lignocellulose degradation enzyme of Table 1 or Table 2. In some embodiments, the glycoside hydrolase is set forth in Table 2. In some embodiments, the cellulase is derived from a filamentous fungal cell, e.g., a Trichoderma sp. or an Aspergillus sp.

### BRIEF DESCRIPTION OF THE TABLES

[0014] Tables 1 and 2 provide a description of the lignocellulose degradation enzymes of the invention. The SEQ ID NOs. shown in the Tables 1 and 2 refer to the nucleic acid and polypeptide sequences provided in the sequence appendix filed herewith, which is incorporated by reference. Table 1: Column 1, nucleic acid sequence identifier; Column 2, amino acid sequence identifier; Column 3, length of encoded polypeptide (number of amino acids); Column 4, indicates whether a secretion signal peptide is encoded by the gene; Column 5, Pfam domain structure present in the polypeptide; Column 6, enzyme class. Table 2: Column 1, nucleic acid sequence identifier; Column 2, amino acid sequence identifier; Column 3, length of encoded polypeptide (number of amino acids); Column 4, minimum fragment size (number of amino acids); Column 5, indicates whether a secretion signal peptide; Column 6, Pfam domain structure present in the polypeptide; Column 7, enzyme class. In the context of this invention, “a polynucleotide of” Table 1 or Table 2 refers to a polynucleotide that comprises a nucleotide sequence of a sequence identifier shown in Column 1; “a polypeptide of” or “lignocellulose degradation enzyme of” Table 1 or Table 2 refers to a polypeptide that comprises an amino acid sequence of a sequence identifier shown in Column 2.

### DETAILED DESCRIPTION OF THE INVENTION

### I. Definitions

[0015] The following definitions are provided to assist the reader. Unless otherwise defined, all terms of art are intended to have the meanings commonly understood by those of skill in the molecular biology and microbiology arts. In some cases, terms with commonly understood meanings are defined herein for clarity and/or for ready reference, and the inclusion of such definitions herein should not necessarily be construed to represent a substantial difference over the definition of the term as generally understood in the art.

[0016] As used in the context of this invention, the term “lignocellulose”, “cellulosic biomass”, and “biomass substrate” are used interchangeably. Lignocellulose is considered to be composed of cellulose (containing only glucose monomers); hemicellulose, which can contain sugar monomers other than glucose, including xylose, mannose, galactose, rhamnose, and arabinose; and lignin.

[0017] The term “lignocellulose degradation enzyme” is used herein to refer to enzymes that participate in lignocellulose degradation, and includes enzymes that degrade cellulose, lignin and hemicellulose. The term thus encompasses cellulases, xylanases, carbohydrate esterases, lipases, and enzymes that break down lignin including oxidases, peroxidases, laccases, etc. Glycoside hydrolases (GHs) are noted in Table 1 and Table 2 as a functional class. Other enzymes that are not glycoside hydrolases that participate in lignocellulose degradation are termed “accessory proteins” or “accessory enzymes” in Tables 1 and 2.

[0018] A “lignocellulose degradation product” as used herein can refer to an end product of lignocellulose degradation such as a soluble sugar, or to a product that undergoes further enzymatic conversion to an endproduct such as a soluble sugar. For example, a laccase can participate in the breakdown of lignin and although the laccase does not directly generate a soluble sugar, treatment of a lignocellulose biomass with laccase can result in an increase in the cellulose that is available for degradation. Similarly, various esterases can remove phenolic and acetyl groups from lignocellulose to aid in the production of soluble sugars. In typical lignocellulose degradation reactions, the cellulosic material is hydrolyzed to break down cellulose and/or hemicellulose to fermentable sugars, such as glucose, cellobiose, xylose, xylulose, arabinose, mannose, galactose, and/or soluble oligosaccharides.

[0019] “Glycoside hydrolases” (GHs), also referred to herein as “glycohydrolases”, (EC 3.2.1.) hydrolyze the glycosidic bond between two or more carbohydrates or between a carbohydrate and a non-carbohydrate moiety. The Carbohydrate-Active Enzymes database (CAZy) provides a continuously updated list of the glycoside hydrolase families. See, the web address “cazy.org/Glycoside-Hydrolases.html”.

[0020] The term “cellulase” refers to a category of enzymes capable of hydrolyzing cellulose (β-1,4-glucan or β-D-glucosidic linkages) to shorter oligosaccharides, cellobiose and/or glucose. Cellulases include 1,4-β-D-glucan glucanohydrolase (“endoglucanase” or “EG”); 1,4-β-D-glucan cellobiohydrolase (“exoglucanase”, “cellobiohydrolase”, or “CBH”); and β-D-glucoside-glucohydrolase (“β-glucosidase”, “cellobiase” or “BG”).

[0021] The term “β-glucosidase” or “cellobiase” used interchangeably herein means a β-D-glucoside glucohydrolase which catalyzes the hydrolysis of a sugar dimer, including but not limited to cellobiose, with the release of a corresponding sugar monomer. In one embodiment, a β-glucosidase is a β-glucoside glucohydrolase of the classification E.C. 3.2.1.21 which catalyzes the hydrolysis of cellobiose to glucose. Some of the β-glucosidases have the ability to also hydrolyze β-D-galactosides, β-L-arabinosides and/or β-D-fucosides and further some β-glucosidases can act on α-1,4-substrates such as starch. β-glucosidase activity may be measured by methods well known in the art, including the assays described hereinbelow. β-glucosidases include, but are not limited to, enzymes classified in the GH1, GH3, GH30, and GH116 GH families,

[0022] The term “β-glucosidase polypeptide” refers herein to a polypeptide having β-glucosidase activity.

[0023] The term “exoglucanase”, “exo-cellobiohydrolase” or “CBH” refers to a group of cellulase enzymes classified as E.C. 3.2.1.91. These enzymes hydrolyze cellobiose from the reducing or non-reducing end of cellulose. Exo-cellobiohydrolases include, but are not limited to, enzymes classified in the GH5, GH6, GH7, GH9, and GH48 GH families.

[0024] The term “endoglucanase” or “EG” refers to a group of cellulase enzymes classified as E.C. 3.2.1.4. These enzymes hydrolyze internal β-1,4 glucosidic bonds of cellulose. Endoglucanases include, but are not limited to, enzymes classified in the GH5, GH6, GH7, GH8, GH9, GH12, GH44, GH45, GH48, GH51, GH61, and GH74 GH families.

[0025] The term “xylanase” refers to a group of enzymes classified as E.C. 3.2.1.8 that catalyze the endo-hydrolysis of 1,4-beta-D-xylosidic linkages in xylans. Xylanases include, but are not limited to, enzymes classified in the GH5, GH8, GH10, GH11, and GH43 GH families.

[0026] The term “xylosidase” refers to a group of enzymes classified as E.C. 3.2.1.37 that catalyze the exo-hydrolysis of short beta (1 [symbol] 4)-xylooligosaccharides, to remove successive D-xylose residues from the non-reducing termini. Xylosidases include, but are not limited to, enzymes classified in the GH3, GH30, GH39, GH43, gH52, GH54, and GH116 GH families.

[0027] The term “arabinofuranosidase” refers to a group of enzymes classified as E.C. 3.2.1.55 that catalyze the hydrolysis of terminal non-reducing α-L-arabinofuranoside residues in α-L-arabinosides. The enzyme activity acts on α-L-arabinofuranosides, α-L-arabinans containing (1,3)- and/or (1,5)-linkages, arabinoxylans, and arabinogalactans. Arabinofuranosidases include, but are not limited to, enzymes classified in the GH3, GH43, GH51, GH54, and GH62 GH families.

[0028] The term “lignocellulose degradation enzyme activity” encompasses glycoside hydrolase enzyme activity, e.g., that hydrolyzes glycosidic bonds of cellulose, e.g., exoglucanase activity (CBH), endoglucanase (EG) activity and/or O-glucosidase activity, as well as the enzymatic activity of accessory enzymes such as carbohydrate esterases, e.g., aryl esterases, including feruloyl and coumaroyl esterases, acetyl esterases, lipases, phospholipases; laccases, oxidases, peroxidases, and the like.

[0029] The term “lignocellulose degradation enzyme polynucleotide” refers to a polynucleotide encoding a polypeptide having lignocellulose degradation enzyme activity.

[0030] As used herein, the term “isolated” refers to a nucleic acid, polynucleotide, polypeptide, protein, or other component that is partially or completely separated from components with which it is normally associated (other proteins, nucleic acids, cells, synthetic reagents, etc.).

[0031] The term “wildtype” as applied to a polypeptide (protein) means a polypeptide (protein) expressed by a naturally occurring microorganism such as bacteria or filamentous fungus. As applied to a microorganism, the term “wildtype” refers to the native, naturally occurring non-recombinant micro-organism.

[0032] A nucleic acid (such as a polynucleotide), and a polypeptide is “recombinant” when it is artificial or engineered. A cell is recombinant when it contains an artificial or engineered protein or nucleic acid or is derived from a recombinant parent cell. For example, a polynucleotide that is inserted into a vector or any other heterologous location, e.g., in a genome of a recombinant organism, such that it is not associated with nucleotide sequences that normally flank the polynucleotide as it is found in nature is a recombinant polynucleotide. A protein expressed in vitro or in vivo from a recombinant polynucleotide is an example of a recombinant polypeptide. Likewise, a polynucleotide sequence that does not appear in nature, for example a variant of a naturally occurring gene, is recombinant.

[0033] The term “culturing” or “cultivation” refers to growing a population of microbial cells under suitable conditions in a liquid or solid medium. In some embodiments, culturing refers to fermentative bioconversion of a cellulosic substrate to an end-product.

[0034] The term “contacting” refers to the placing of a respective enzyme in sufficiently close proximity to a respective substrate to enable the enzyme to convert the substrate to a product. Those skilled in the art will recognize that mixing solution of the enzyme with the respective substrate will effect contacting.

[0035] As used herein the term “transformed” or “transformation” used in reference to a cell means a cell has a non-native nucleic acid sequence integrated into its genome or as an episomal plasmid that is maintained through multiple generations.

[0036] The term “introduced” in the context of inserting a nucleic acid sequence into a cell means transfected, transduced or transformed (collectively “transformed”) and prokaryotic cell wherein the nucleic acid is incorporated into the genome of the cell.

[0037] As used herein, “C1” refers to a fungal strain described by Garg, A., 1966, “An addition to the genus Chrysosporium corda” Mycopathologia 30: 3-4. “Chrysosporium lucknowense” includes the strains described in U.S. Pat. Nos. 6,015,707, 5,811,381 and 6,573,086; US Pat. Pub. Nos. 2007/0238155, US 2008/0194005, US 2009/0099079; International Pat. Pub. Nos., WO 2008/073914 and WO 98/15633, and include, without limitation, Chrysosporium lucknowense Garg 27K, VKM-F 3500 D (Accession No. VKM F-3500-D), C1 strain UV13-6 (Accession No. VKM F-3632 D), C1 strain NG7C-19 (Accession No. VKM F-3633 D), and C1 strain UV18-25 (VKM F-3631 D), all of which have been deposited at the All-Russian Collection of Microorganisms of Russian Academy of Sciences (VKM), Bakhurhina St. 8, Moscow, Russia, 113184, and any derivatives thereof. Although initially described as Chrysosporium lucknowense, C1 may currently be considered a strain of Myceliophthora thermophilia. Exemplary C1 strains include modified organisms in which one or more endogenous genes or sequences has been deleted or modified and/or one or more heterologous genes or sequences has been introduced, such as UV18#100.f (CBS Accession No. 122188). Derivatives include UV18#100.f Δalp1, UV18#100.f Δpyr5 Δalp1, UV18#100.f Δalp1 Δpep4 Δalp2, UV18#100.f Δpyr5 Δalp1 Δpep4 Δalp2 and UV18#100.f Δpyr4 Δpyr5 Δalp1 Δpep4 Δalp2, as described in WO2008073914, incorporated herein by reference.

[0038] The term “operably linked” refers herein to a configuration in which a control sequence is appropriately placed at a position relative to the coding sequence of the DNA sequence such that the control sequence influences the expression of RNA encoding a polypeptide.

[0039] When used herein, the term “coding sequence” is intended to cover a nucleotide sequence that directly specifies the amino acid sequence of its protein product. The boundaries of the coding sequence are generally determined by an open reading frame, which usually begins with the ATG start codon.

[0040] A promoter or other nucleic acid control sequence is “heterologous”, when it is operably linked to a sequence encoding a protein sequence with which the promoter is not associated in nature. For example, in a recombinant construct in which the C1 Cbh1a promoter is operably linked to a protein coding sequence other than the C1 Cbh1a gene the promoter is heterologous. For example, in a construct comprising a C1 Cbh1a promoter operably linked to a C1 nucleic acid encoding a lignocellulose degradation enzyme of Table 1 or Table 2, the promoter is heterologous. Similarly, a polypeptide sequence such as a secretion signal sequence, is “heterologous” to a polypeptide sequence when it is linked to a polypeptide sequence that it is not associated with in nature.

[0041] As used herein, the term “expression” includes any step involved in the production of the polypeptide including, but not limited to, transcription, post-transcriptional modification, translation, post-translational modification, and secretion.

[0042] The term “expression vector” refers herein to a DNA molecule, linear or circular, that comprises a segment encoding a polypeptide of the invention, and which is operably linked to additional segments that provide for its transcription.

[0043] A polypeptide is “enzymatically active” when it has a lignocellulose degradation enzyme activity. Thus, a polypeptide of the invention may have a glycoside hydrolase activity, or another enzymatic activity shown in Table 1 or Table 2.

[0044] The term “pre-protein” refers to a secreted protein with an amino-terminal signal peptide region attached. The signal peptide is cleaved from the pre-protein by a signal peptidase prior to secretion to result in the “mature” or “secreted” protein.

[0045] As used herein, a “start codon” is the ATG codon that encodes the first amino acid residue (methionine) of a protein.

### II. Introduction

[0046] The fungus C1 produces a variety of enzymes that act in concert to catalyze decrystallization and hydrolysis of cellulose to yield soluble sugars. The present invention is based on the discovery and characterization of C1 genes encoding lignocellulose degradation enzymes that can be used to facilitate lignocellulose degradation.

[0047] The C1 lignocellulose degradation enzymes of the invention, and polynucleotides encoding them, may be used in a variety of applications in which lignocellulose degradation enzyme activity is desired, such as those described hereinbelow. For simplicity, and as will be apparent from context, references to a “C1 lignocellulose degradation enzyme” and the like may be used to refer both to a secreted mature form of the enzyme protein and to the pre-protein form.

[0048] In various embodiments of the invention, a recombinant nucleic acid sequence is operably linked to a promoter. In one embodiment, a nucleic acid sequence encoding a C1 lignocellulose degradation enzyme comprising an amino acid sequence selected from SEQ ID NO:2, SEQ ID NO: 4, SEQ ID NO: 6, SEQ ID NO: 8, SEQ ID NO: 10, SEQ ID NO: 12, SEQ ID NO: 14, SEQ ID NO: 16, SEQ ID NO: 18, SEQ ID NO: 20, SEQ ID NO: 22, SEQ ID NO: 24, SEQ ID NO: 26, SEQ ID NO: 28, SEQ ID NO: 30, SEQ ID NO: 32, SEQ ID NO: 34, SEQ ID NO: 36, SEQ ID NO: 38, SEQ ID NO: 40, SEQ ID NO: 42, SEQ ID NO: 44, SEQ ID NO: 46, SEQ ID NO: 48, SEQ ID NO: 50, SEQ ID NO: 52, SEQ ID NO: 54, SEQ ID NO: 56, SEQ ID NO: 58, SEQ ID NO: 60, SEQ ID NO: 62, SEQ ID NO: 64, SEQ ID NO: 66, SEQ ID NO: 68, SEQ ID NO: 70, SEQ ID NO: 72, SEQ ID NO: 74, SEQ ID NO: 76, SEQ ID NO: 78, SEQ ID NO: 80, SEQ ID NO: 82, SEQ ID NO: 84, SEQ ID NO: 86, SEQ ID NO: 88, SEQ ID NO: 90, SEQ ID NO: 92, SEQ ID NO: 94, SEQ ID NO: 96, SEQ ID NO: 98, SEQ ID NO: 100, SEQ ID NO: 102, SEQ ID NO: 104, SEQ ID NO: 106, SEQ ID NO: 108, SEQ ID NO: 110, SEQ ID NO: 112, SEQ ID NO: 114, SEQ ID NO: 116, SEQ ID NO: 118, SEQ ID NO: 120, SEQ ID NO: 122, SEQ ID NO: 124, SEQ ID NO: 126, SEQ ID NO: 128, SEQ ID NO: 130, SEQ ID NO: 132, SEQ ID NO: 134, SEQ ID NO: 136, SEQ ID NO: 138, SEQ ID NO: 140, SEQ ID NO: 142, SEQ ID NO: 144, SEQ ID NO: 146, SEQ ID NO: 148, SEQ ID NO: 150, SEQ ID NO: 152, SEQ ID NO: 154, SEQ ID NO: 156, SEQ ID NO: 158, SEQ ID NO: 160, SEQ ID NO: 162, SEQ ID NO: 164, SEQ ID NO: 166, SEQ ID NO: 168, SEQ ID NO: 170, SEQ ID NO: 172, SEQ ID NO: 174, SEQ ID NO: 176, or SEQ ID NO: 178; or an amino acid sequence selected from SEQ ID NO: 180, SEQ ID NO: 182, SEQ ID NO: 184, SEQ ID NO: 186, SEQ ID NO: 188, SEQ ID NO: 190, SEQ ID NO: 192, SEQ ID NO: 194, SEQ ID NO: 196, SEQ ID NO: 198, SEQ ID NO: 200, SEQ ID NO: 202, SEQ ID NO: 204, SEQ ID NO: 206, SEQ ID NO: 208, SEQ ID NO: 210, SEQ ID NO: 212, SEQ ID NO: 214, SEQ ID NO: 216, SEQ ID NO: 218, SEQ ID NO: 220, SEQ ID NO: 222, SEQ ID NO: 224, SEQ ID NO: 226, SEQ ID NO: 228, SEQ ID NO: 230, SEQ ID NO: 232, SEQ ID NO: 234, SEQ ID NO: 236, SEQ ID NO: 238, SEQ ID NO: 240, SEQ ID NO: 242, SEQ ID NO: 244, SEQ ID NO: 246, SEQ ID NO: 248, SEQ ID NO: 250, SEQ ID NO: 252, SEQ ID NO: 254, SEQ ID NO: 256, SEQ ID NO: 258, SEQ ID NO: 260, SEQ ID NO: 262, SEQ ID NO: 264, SEQ ID NO: 266, SEQ ID NO: 268, SEQ ID NO: 270, SEQ ID NO: 272, SEQ ID NO: 274, SEQ ID NO: 276, SEQ ID NO: 278, SEQ ID NO: 280, SEQ ID NO: 282, SEQ ID NO: 284, SEQ ID NO: 286, SEQ ID NO: 288, SEQ ID NO: 290, SEQ ID NO: 292, SEQ ID NO: 294, SEQ ID NO: 296, SEQ ID NO: 298, SEQ ID NO: 300, SEQ ID NO: 302, SEQ ID NO: 304, SEQ ID NO: 306, SEQ ID NO: 308, SEQ ID NO: 310, SEQ ID NO: 312, SEQ ID NO: 314, SEQ ID NO: 316, SEQ ID NO: 318, SEQ ID NO: 320, SEQ ID NO: 322, SEQ ID NO: 324, SEQ ID NO: 326, SEQ ID NO: 328, SEQ ID NO: 330, SEQ ID NO: 332, SEQ ID NO: 334, SEQ ID NO: 336, SEQ ID NO: 338, SEQ ID NO: 340, SEQ ID NO: 342, SEQ ID NO: 344, SEQ ID NO: 346, SEQ ID NO: 348, SEQ ID NO: 350, SEQ ID NO: 352, SEQ ID NO: 354, SEQ ID NO: 356, SEQ ID NO: 358, SEQ ID NO: 360, SEQ ID NO: 362, SEQ ID NO: 364, SEQ ID NO: 366, SEQ ID NO: 368, SEQ ID NO: 370, SEQ ID NO: 372, SEQ ID NO: 374, SEQ ID NO: 376, SEQ ID NO: 378, SEQ ID NO: 380, SEQ ID NO: 382, SEQ ID NO: 384, SEQ ID NO: 386, SEQ ID NO: 388, SEQ ID NO: 390, SEQ ID NO: 392, SEQ ID NO: 394, SEQ ID NO: 396, SEQ ID NO: 398, SEQ ID NO: 400, SEQ ID NO: 402, SEQ ID NO: 404, SEQ ID NO: 406, SEQ ID NO: 408, SEQ ID NO: 410, SEQ ID NO: 412, SEQ ID NO: 414, SEQ ID NO: 416, SEQ ID NO: 418, SEQ ID NO: 420, SEQ ID NO: 422, SEQ ID NO: 424, SEQ ID NO: 426, SEQ ID NO: 428, SEQ ID NO: 430, SEQ ID NO: 432, SEQ ID NO: 434, SEQ ID NO: 436, SEQ ID NO: 438, SEQ ID NO: 440, SEQ ID NO: 442, SEQ ID NO: 444, SEQ ID NO: 446, SEQ ID NO: 448, SEQ ID NO: 450, SEQ ID NO: 452, SEQ ID NO: 454, SEQ ID NO: 456, SEQ ID NO: 458, SEQ ID NO: 460, SEQ ID NO: 462, SEQ ID NO: 464, SEQ ID NO: 466, SEQ ID NO: 468, SEQ ID NO: 470, SEQ ID NO: 472, SEQ ID NO: 474, SEQ ID NO: 476, SEQ ID NO: 478, SEQ ID NO: 480, SEQ ID NO: 482, SEQ ID NO: 484, SEQ ID NO: 486, SEQ ID NO: 488, SEQ ID NO: 490, SEQ ID NO: 492, SEQ ID NO: 494, SEQ ID NO: 496, SEQ ID NO: 498, SEQ ID NO: 500, SEQ ID NO: 502, SEQ ID NO: 504, SEQ ID NO: 506, SEQ ID NO: 508, SEQ ID NO: 510, SEQ ID NO: 512, SEQ ID NO: 514, SEQ ID NO: 516, SEQ ID NO: 518, SEQ ID NO: 520, SEQ ID NO: 522, SEQ ID NO: 524, SEQ ID NO: 526, SEQ ID NO: 528, SEQ ID NO: 530, SEQ ID NO: 532, SEQ ID NO: 534, SEQ ID NO: 536, SEQ ID NO: 538, SEQ ID NO: 540, SEQ ID NO: 542, SEQ ID NO: 544, SEQ ID NO: 546, SEQ ID NO: 548, SEQ ID NO: 550, SEQ ID NO: 552, SEQ ID NO: 554, SEQ ID NO: 556, SEQ ID NO: 558, SEQ ID NO: 560, SEQ ID NO: 562, SEQ ID NO: 564, SEQ ID NO: 566, SEQ ID NO: 568, SEQ ID NO: 570, SEQ ID NO: 572, SEQ ID NO: 574, SEQ ID NO: 576, SEQ ID NO: 578, SEQ ID NO: 580, SEQ ID NO: 582, SEQ ID NO: 584, SEQ ID NO: 586, SEQ ID NO: 588, SEQ ID NO: 590, SEQ ID NO: 592, SEQ ID NO: 594, SEQ ID NO: 596, SEQ ID NO: 598, SEQ ID NO: 600, SEQ ID NO: 602, SEQ ID NO: 604, SEQ ID NO: 606, SEQ ID NO: 608, SEQ ID NO: 610, SEQ ID NO: 612, SEQ ID NO: 614, SEQ ID NO: 616, SEQ ID NO: 618, SEQ ID NO: 620, SEQ ID NO: 622, SEQ ID NO: 624, SEQ ID NO: 626, SEQ ID NO: 628, SEQ ID NO: 630, SEQ ID NO: 632, SEQ ID NO: 634, SEQ ID NO: 636, SEQ ID NO: 638, SEQ ID NO: 640, SEQ ID NO: 642, SEQ ID NO: 644, SEQ ID NO: 646, SEQ ID NO: 648, SEQ ID NO: 650, SEQ ID NO: 652, SEQ ID NO: 654, SEQ ID NO: 656, SEQ ID NO: 658, SEQ ID NO: 660, SEQ ID NO: 662, SEQ ID NO: 664, SEQ ID NO: 666, SEQ ID NO: 668, SEQ ID NO: 670, SEQ ID NO: 672, SEQ ID NO: 674, SEQ ID NO: 676, SEQ ID NO: 678, SEQ ID NO: 680, SEQ ID NO: 682, SEQ ID NO: 684, SEQ ID NO: 686, SEQ ID NO: 688, SEQ ID NO: 690, SEQ ID NO: 692, SEQ ID NO: 694, SEQ ID NO: 696, SEQ ID NO: 698, SEQ ID NO: 700, SEQ ID NO: 702, SEQ ID NO: 704, SEQ ID NO: 706, SEQ ID NO: 708, SEQ ID NO: 710, SEQ ID NO: 712, SEQ ID NO: 714, SEQ ID NO: 716, SEQ ID NO: 718, or SEQ ID NO: 720 is operably linked to a promoter not associated with the enzyme in nature (i.e., a heterologous promoter), to, for example, improve expression efficiency of the cellulose degradation enzyme protein when expressed in a host cell. In one embodiment the host cell is a fungus, such as a filamentous fungus. In one embodiment the host cell is a C1 cell. In one embodiment the host cell is a C1 cell and the promoter is a heterologous C1 promoter.

[0049] A C1 lignocellulose degradation enzyme expression system comprising one or more lignocellulose degradation enzymes of Table 1 or Table 2 is particularly useful for production of soluble carbohydrates from cellulosic biomass. In one aspect the invention relates to a method of producing a soluble sugar, e.g., glucose, xylose, etc., by contacting a composition comprising cellulosic biomass with a recombinantly expressed C1 enzyme of Table 1 or Table 2, e.g., a glycohydrolase of Table 1 or Table 2, under conditions in which the biomass is enzymatically degraded. In some embodiments, the cellulosic biomass is contacted with one or more accessory enzymes of Table 1 or Table 2. Purified or partially purified recombinant lignocellulose degradation enzyme may be contacted with the cellulosic biomass. In one aspect of the present invention, said “contacting” comprises culturing a recombinant host cell in a medium that contains biomass produced from a lignocellulosic feedstock, where the recombinant cell comprises a sequence encoding a C1 lignocellulose degradation enzyme of Table 1 or Table 2 operably linked to a heterologous promoter or to a homologous promoter when said sequence is present in multiple copies per cell.

[0050] In some embodiments, a lignocellulose degradation enzyme of the invention comprises a fragment of a polypeptide having an amino acid sequence set forth in Table 2 (i.e., an amino acid sequence set forth in SEQ ID NO: 180, SEQ ID NO: 182, SEQ ID NO: 184, SEQ ID NO: 186, SEQ ID NO: 188, SEQ ID NO: 190, SEQ ID NO: 192, SEQ ID NO: 194, SEQ ID NO: 196, SEQ ID NO: 198, SEQ ID NO: 200, SEQ ID NO: 202, SEQ ID NO: 204, SEQ ID NO: 206, SEQ ID NO: 208, SEQ ID NO: 210, SEQ ID NO: 212, SEQ ID NO: 214, SEQ ID NO: 216, SEQ ID NO: 218, SEQ ID NO: 220, SEQ ID NO: 222, SEQ ID NO: 224, SEQ ID NO: 226, SEQ ID NO: 228, SEQ ID NO: 230, SEQ ID NO: 232, SEQ ID NO: 234, SEQ ID NO: 236, SEQ ID NO: 238, SEQ ID NO: 240, SEQ ID NO: 242, SEQ ID NO: 244, SEQ ID NO: 246, SEQ ID NO: 248, SEQ ID NO: 250, SEQ ID NO: 252, SEQ ID NO: 254, SEQ ID NO: 256, SEQ ID NO: 258, SEQ ID NO: 260, SEQ ID NO: 262, SEQ ID NO: 264, SEQ ID NO: 266, SEQ ID NO: 268, SEQ ID NO: 270, SEQ ID NO: 272, SEQ ID NO: 274, SEQ ID NO: 276, SEQ ID NO: 278, SEQ ID NO: 280, SEQ ID NO: 282, SEQ ID NO: 284, SEQ ID NO: 286, SEQ ID NO: 288, SEQ ID NO: 290, SEQ ID NO: 292, SEQ ID NO: 294, SEQ ID NO: 296, SEQ ID NO: 298, SEQ ID NO: 300, SEQ ID NO: 302, SEQ ID NO: 304, SEQ ID NO: 306, SEQ ID NO: 308, SEQ ID NO: 310, SEQ ID NO: 312, SEQ ID NO: 314, SEQ ID NO: 316, SEQ ID NO: 318, SEQ ID NO: 320, SEQ ID NO: 322, SEQ ID NO: 324, SEQ ID NO: 326, SEQ ID NO: 328, SEQ ID NO: 330, SEQ ID NO: 332, SEQ ID NO: 334, SEQ ID NO: 336, SEQ ID NO: 338, SEQ ID NO: 340, SEQ ID NO: 342, SEQ ID NO: 344, SEQ ID NO: 346, SEQ ID NO: 348, SEQ ID NO: 350, SEQ ID NO: 352, SEQ ID NO: 354, SEQ ID NO: 356, SEQ ID NO: 358, SEQ ID NO: 360, SEQ ID NO: 362, SEQ ID NO: 364, SEQ ID NO: 366, SEQ ID NO: 368, SEQ ID NO: 370, SEQ ID NO: 372, SEQ ID NO: 374, SEQ ID NO: 376, SEQ ID NO: 378, SEQ ID NO: 380, SEQ ID NO: 382, SEQ ID NO: 384, SEQ ID NO: 386, SEQ ID NO: 388, SEQ ID NO: 390, SEQ ID NO: 392, SEQ ID NO: 394, SEQ ID NO: 396, SEQ ID NO: 398, SEQ ID NO: 400, SEQ ID NO: 402, SEQ ID NO: 404, SEQ ID NO: 406, SEQ ID NO: 408, SEQ ID NO: 410, SEQ ID NO: 412, SEQ ID NO: 414, SEQ ID NO: 416, SEQ ID NO: 418, SEQ ID NO: 420, SEQ ID NO: 422, SEQ ID NO: 424, SEQ ID NO: 426, SEQ ID NO: 428, SEQ ID NO: 430, SEQ ID NO: 432, SEQ ID NO: 434, SEQ ID NO: 436, SEQ ID NO: 438, SEQ ID NO: 440, SEQ ID NO: 442, SEQ ID NO: 444, SEQ ID NO: 446, SEQ ID NO: 448, SEQ ID NO: 450, SEQ ID NO: 452, SEQ ID NO: 454, SEQ ID NO: 456, SEQ ID NO: 458, SEQ ID NO: 460, SEQ ID NO: 462, SEQ ID NO: 464, SEQ ID NO: 466, SEQ ID NO: 468, SEQ ID NO: 470, SEQ ID NO: 472, SEQ ID NO: 474, SEQ ID NO: 476, SEQ ID NO: 478, SEQ ID NO: 480, SEQ ID NO: 482, SEQ ID NO: 484, SEQ ID NO: 486, SEQ ID NO: 488, SEQ ID NO: 490, SEQ ID NO: 492, SEQ ID NO: 494, SEQ ID NO: 496, SEQ ID NO: 498, SEQ ID NO: 500, SEQ ID NO: 502, SEQ ID NO: 504, SEQ ID NO: 506, SEQ ID NO: 508, SEQ ID NO: 510, SEQ ID NO: 512, SEQ ID NO: 514, SEQ ID NO: 516, SEQ ID NO: 518, SEQ ID NO: 520, SEQ ID NO: 522, SEQ ID NO: 524, SEQ ID NO: 526, SEQ ID NO: 528, SEQ ID NO: 530, SEQ ID NO: 532, SEQ ID NO: 534, SEQ ID NO: 536, SEQ ID NO: 538, SEQ ID NO: 540, SEQ ID NO: 542, SEQ ID NO: 544, SEQ ID NO: 546, SEQ ID NO: 548, SEQ ID NO: 550, SEQ ID NO: 552, SEQ ID NO: 554, SEQ ID NO: 556, SEQ ID NO: 558, SEQ ID NO: 560, SEQ ID NO: 562, SEQ ID NO: 564, SEQ ID NO: 566, SEQ ID NO: 568, SEQ ID NO: 570, SEQ ID NO: 572, SEQ ID NO: 574, SEQ ID NO: 576, SEQ ID NO: 578, SEQ ID NO: 580, SEQ ID NO: 582, SEQ ID NO: 584, SEQ ID NO: 586, SEQ ID NO: 588, SEQ ID NO: 590, SEQ ID NO: 592, SEQ ID NO: 594, SEQ ID NO: 596, SEQ ID NO: 598, SEQ ID NO: 600, SEQ ID NO: 602, SEQ ID NO: 604, SEQ ID NO: 606, SEQ ID NO: 608, SEQ ID NO: 610, SEQ ID NO: 612, SEQ ID NO: 614, SEQ ID NO: 616, SEQ ID NO: 618, SEQ ID NO: 620, SEQ ID NO: 622, SEQ ID NO: 624, SEQ ID NO: 626, SEQ ID NO: 628, SEQ ID NO: 630, SEQ ID NO: 632, SEQ ID NO: 634, SEQ ID NO: 636, SEQ ID NO: 638, SEQ ID NO: 640, SEQ ID NO: 642, SEQ ID NO: 644, SEQ ID NO: 646, SEQ ID NO: 648, SEQ ID NO: 650, SEQ ID NO: 652, SEQ ID NO: 654, SEQ ID NO: 656, SEQ ID NO: 658, SEQ ID NO: 660, SEQ ID NO: 662, SEQ ID NO: 664, SEQ ID NO: 666, SEQ ID NO: 668, SEQ ID NO: 670, SEQ ID NO: 672, SEQ ID NO: 674, SEQ ID NO: 676, SEQ ID NO: 678, SEQ ID NO: 680, SEQ ID NO: 682, SEQ ID NO: 684, SEQ ID NO: 686, SEQ ID NO: 688, SEQ ID NO: 690, SEQ ID NO: 692, SEQ ID NO: 694, SEQ ID NO: 696, SEQ ID NO: 698, SEQ ID NO: 700, SEQ ID NO: 702, SEQ ID NO: 704, SEQ ID NO: 706, SEQ ID NO: 708, SEQ ID NO: 710, SEQ ID NO: 712, SEQ ID NO: 714, SEQ ID NO: 716, SEQ ID NO: 718, or SEQ ID NO: 720), where the fragment comprises a number of contiguous amino acid residues of the sequence that is at least the number shown in Column 4 and less than the length shown in column 3 for that sequence. In some embodiments, the fragment comprises a number of contiguous amino acid residues of the sequence that is from 20 to 30 residues less fewer in length than the number shown in Column 3.

[0051] In another aspect of the invention, a heterologous C1 signal peptide may be fused to the amino terminus of a lignocellulose degradation enzyme polypeptide of Table 1 or Table 2 to improve secretion, stability, or other properties of the polypeptide when expressed in a host cell, e.g., a fungal cell such as C1.

[0052] In some embodiments, a lignocellulose degradation enzyme of the invention is a glycohydrolase that has an amino acid sequence identified in Table 2 and comprises a GH3, GH5, GH6, GH7, GH10, GH11, GH62, GH30, or GH43 family Pfam domain.

[0053] In some embodiments, a lignocellulose degradation enzyme of the invention is a cellobiohydrolase or endoglucanase that is a member of a GH5, GH6, or GH7 family and has an amino acid sequence of a glycohydrolase set forth in Table 2. In some embodiments, a lignocellulose degradation enzyme of the invention is a β-glucosidase that is a member of a GH3 or GH30 family and has an amino acid sequence of a glycohydrolase set forth in Table 2. In some embodiments, a lignocellulose degradation enzyme of the invention is a β-xylosidase that is a member of a GH3, GH30, or GH43 family and has an amino acid sequence of a glycohydrolase set forth in Table 2. In some embodiments, a lignocellulose degradation enzyme of the invention is a xylanase that is a member of a GH5, GH10, GH11, or GH43 family and has an amino acid sequence of a glyocohydrolase set forth in Table 2. In some embodiments, a lignocellulose degradation enzyme of the invention is an arabinofuranosidase that is a member of a GH3, GH43, or GH62 family and has an amino acid sequence of a glyocohydrolase set forth in Table 2.

[0054] Various aspects of the invention are described in the following sections.

### III. Properties of Lignocellulose Degradation Enzyme Proteins for Use in Methods of the Invention

[0055] In one aspect, the invention provides a method for expressing a lignocellulose degradation enzyme by culturing a host cell comprising a vector comprising a nucleic acid sequence encoding a C1 polypeptide sequence of Table 1 or Table 2 operably linked to a heterologous promoter, under conditions in which the lignocellulose degradation protein or an enzymatically active fragment thereof is expressed. Generally, the expressed protein comprises a signal peptide which is removed in the secretion process. In some embodiments, the nucleic acid sequence is a nucleic acid sequence of Table 1 or Table 2.

[0056] In some embodiments the lignocellulose degradation enzyme polypeptide of Table 1 or Table 2 includes additional sequences that do not alter the activity of the encoded enzyme. For example, the lignocellulose degradation enzyme polypeptide may be linked to an epitope tag or to other sequence useful in purification.

### Signal Peptide

[0057] In general, lignocellulose degradation enzyme polypeptides are secreted from the host cell in which they are expressed (e.g., C1) and are expressed as a pre-protein including a signal peptide, i.e., an amino acid sequence linked to the amino terminus of a polypeptide that directs the encoded polypeptide into the cell secretory pathway. In one embodiment, the signal peptide is an endogenous C1 signal peptide of a polypeptide sequence of Table 1 or Table 2. In other embodiments, signal peptide from other C1 secreted proteins are used.

[0058] Other signal peptides may be used, depending on the host cell and other factors. Effective signal peptide coding regions for filamentous fungal host cells include but are not limited to the signal peptide coding regions obtained from Aspergillus oryzae TAKA amylase, Aspergillus niger neutral amylase, Aspergillus niger glucoamylase, Rhizomucor miehei asparatic proteinase, Humicola insolens cellulase, Humicola lanuginosa lipase, and T. reesei cellobiohydrolase II. For example, a C1 lignocellulose degradation enzyme sequence may be used with a variety of filamentous fungal signal peptides known in the art. Useful signal peptides for yeast host cells also include those from the genes for Saccharomyces cerevisiae alpha-factor and Saccharomyces cerevisiae invertase. Still other useful signal peptide coding regions are described by Romanos et al., 1992, Yeast 8:423-488. Effective signal peptide coding regions for bacterial host cells are the signal peptide coding regions obtained from the genes for Bacillus NClB 11837 maltogenic amylase, Bacillus stearothermophilus alpha-amylase, Bacillus licheniformis subtilisin, Bacillus licheniformis β-lactamase, Bacillus stearothermophilus neutral proteases (nprT, nprS, nprM), and Bacillus subtilis prsA. Further signal peptides are described by Simonen and Palva, 1993, Microbiol Rev 57: 109-137. Variants of these signal peptides and other signal peptides are also suitable.

### Enzyme Activity

[0059] The activity of lignocellulose degradation enzymes of the invention, e.g., to evaluate an expression system, assess activity levels in an enzyme mixture comprising the enzyme, etc. can be determined by methods well known in the art for each of the various glycoside hydrolases or accessory proteins of Table 1 or Table 2. For example, esterase activity can be determined by measuring the ability of an enzyme to hydrolyze an ester. Glycoside hydrolase activity can be determined using known assays to measure the hydrolysis of glyosidic linkages. Enzymatic activity of oxidases and oxidoreductases can be assessed using techniques to measure oxidation of known substrates.

[0060] Thus, for example, α-arabinofuranosidase enzymatic activity can be measured by measuring the release of p-nitrophenol by the action of α-arabinofuranosidase on p-nitrophenyl α-L-arabinofuranoside. Xylosidase activity can be assessed, e.g., by measuring the release of xylose by the action of a xylosidase on xylobiose. Xylanase activity can be assessed using known assays. For example, xylanolytic activity can be assayed based on production of reducing sugars from polymeric 4-O-methyl glucuronoxylan as described in Bailey, et al., 1992, Journal of Biotechnol. 23(3): 257-270. β-glucosidase activity can be determined, e.g., by using a colorimetric pNPG (p-nitrophenyl-β-D-glucopyranoside)-based assay that measure the enzyme-mediated conversion of pNPG to p-nitrophenol or by using an assay in which cellobiose is the substrate. Endoglucanase activity may be determined, e.g., either by a colorimetric para-nitrophenyl-β-D-cellobioside (pNPC) assay, or a cellulose assay. Cellobiohydrolase activity can be determined, e.g., by assessing release of water-soluble reducing sugar from cellulose as measured by the PAHBAH method of Lever et al., 1972, Anal. Biochem. 47: 273-279.)

### IV. Lignocellulose Degradation Enzyme Polynucleotides and Expression Systems

[0061] The present invention provides polynucleotide sequences that encode C1 lignocellulose degradation enzymes. The C1 cDNA sequences encoding lignocellulose degradation enzymes are each identified by a sequence identifier in Tables 1 and 2 with reference to the appended sequence listing. These sequences encode the respective polypeptides in Table 1 and Table 2, which are each identified by a sequence identifier with reference to the appended sequence listing. Those having ordinary skill in the art will readily appreciate that due to the degeneracy of the genetic code, a multitude of nucleotide sequences encoding cellulose degradation enzyme polypeptides of Table 1 or Table 2 exist. For example, the codons AGA, AGG, CGA, CGC, CGG, and CGU all encode the amino acid arginine. Thus, at every position in the nucleic acids of the invention where an arginine is specified by a codon, the codon can be altered to any of the corresponding codons described above without altering the encoded polypeptide. It is understood that U in an RNA sequence corresponds to T in a DNA sequence. The invention contemplates and provides each and every possible variation of nucleic acid sequence encoding a lignocellulose degradation polypeptide of the invention that could be made by selecting combinations based on possible codon choices.

[0062] A DNA sequence may also be designed for high codon usage bias codons (codons that are used at higher frequency in the protein coding regions than other codons that code for the same amino acid). The preferred codons may be determined in relation to codon usage in a single gene, a set of genes of common function or origin, highly expressed genes, the codon frequency in the aggregate protein coding regions of the whole organism, codon frequency in the aggregate protein coding regions of related organisms, or combinations thereof. Codons whose frequency increases with the level of gene expression are typically optimal codons for expression. In particular, a DNA sequence can be optimized for expression in a particular host organism. See GCG CodonPreference, Genetics Computer Group Wisconsin Package; Codon W, John Peden, University of Nottingham; McInerney, J. O. 1998, Bioinformatics 14:372-73; Stenico et al., 1994, Nucleic Acids Res. 222437-46; Wright, F., 1990, Gene 87:23-29; Wada et al., 1992, Nucleic Acids Res. 20:2111-2118; Nakamura et al., 2000, Nucl. Acids Res. 28:292, all of which are incorporated herein be reference.

### Expression Vectors

[0063] The present invention makes use of recombinant constructs comprising a sequence encoding a lignocellulose degradation enzyme of Table 1 or Table 2. In a particular aspect, the present invention provides an expression vector encoding a glycohydrolase of Table 1 or Table 2 wherein the polynucleotide encoding the glycohydrolase is operably linked to a heterologous promoter. In another aspect, the invention provides an expression vector encoding an accessory enzyme of Table 1 or Table 2. Expression vectors of the present invention may be used to transform an appropriate host cell to permit the host to express the lignocellulose degradation protein. Methods for recombinant expression of proteins in fungi and other organisms are well known in the art, and any number of expression vectors are available or can be constructed using routine methods. See, e.g., Tkacz and Lange, 2004, ADVANCES IN FUNGAL BIOTECHNOLOGY FOR INDUSTRY, AGRICULTURE, AND MEDICINE, KLUWER ACADEMIC/PLENUM PUBLISHERS. New York; Zhu et al., 2009, Construction of two Gateway vectors for gene expression in fungi Plasmid 6:128-33; Kavanagh, K. 2005, FUNGI: BIOLOGY AND APPLICATIONS Wiley, all of which are incorporated herein by reference.

[0064] Nucleic acid constructs of the present invention comprise a vector, such as, a plasmid, a cosmid, a phage, a virus, a bacterial artificial chromosome (BAC), a yeast artificial chromosome (YAC), and the like, into which a nucleic acid sequence encoding a lignocellulose degradation enzyme protein of Table 1 or Table 2 has been inserted. The nucleic acids can be incorporated into any one of a variety of expression vectors suitable for expressing a polypeptide. Suitable vectors include chromosomal, nonchromosomal and synthetic DNA sequences, e.g., derivatives of SV40; bacterial plasmids; phage DNA; baculovirus; yeast plasmids; vectors derived from combinations of plasmids and phage DNA, viral DNA such as vaccinia, adenovirus, fowl pox virus, pseudorabies, adenovirus, adeno-associated virus, retroviruses and many others. Any vector that transduces genetic material into a cell, and, if replication is desired, which is replicable and viable in the relevant host can be used.

[0065] In an aspect of this embodiment, the construct further comprises regulatory sequences, including, for example, a promoter, operably linked to the protein encoding sequence. Large numbers of suitable vectors and promoters are known to those of skill in the art. The construct may optionally include nucleotide sequences to facilitate integration into a host genome and/or results in amplification of construct copy number in vivo.

### Promoter/Gene Constructs

[0066] As discussed above, to obtain high levels of expression in a particular host it is often useful to express C1 lignocellulose degradation enzymes under control of a heterologous promoter. Typically a promoter sequence may be operably linked to the 5′ region of the C1 lignocellulose degradation protein coding sequence. It will be recognized that in making such a construct it is not necessary to define the bounds of a minimal promoter. Instead, the DNA sequence 5′ to the C1 lignocellulose degradation gene start codon can be replaced with DNA sequence that is 5′ to the start codon of a given heterologous gene (e.g., a C1 sequence from another gene, or a promoter from another organism). This 5′ “heterologous” sequence thus includes, in addition to the promoter elements per se, a transcription start signal and the sequence of the 5′ untranslated portion of the transcribed chimeric mRNA. Thus, the promoter-gene construct and resulting mRNA will comprise a sequence encoding a lignocellulose degradation enzyme of Table 1 or Table 2 and a heterologous 5′ sequence upstream to the start codon of the sequence encoding the lignocellulose degradation enzyme. In some, but not all, cases the heterologous 5′ sequence will immediately abut the start codon of the polynucleotide sequence encoding the cellulose degradation protein. In some embodiments, gene constructs may be employed in which a polynucleotide encoding a lignocellulose degradation enzyme of Table 1 or Table 2 is present in multiple copies. Such embodiments, may employ the endogenous promoter for the lignocellulose degradation gene or may employ a heterologous promoter.

[0067] In one embodiment, the C1 lignocellulose degradation enzyme is expressed as a pre-protein including the naturally occurring signal peptide of a lignocellulose degradation enzyme in Table 1 or Table 2.

[0068] In one embodiment of the gene construct of the present invention, the C1 lignocellulose degradation enzyme is expressed from the construct as a pre-protein with a heterologous signal peptide.

[0069] In some embodiments the heterologous promoter is operably linked to a lignocellulose degradation enzyme cDNA nucleic acid sequence of Table 1 or Table 2.

[0070] Examples of useful promoters for expression of lignocellulose degradation enzymes include promoters from fungi. For example, promoter sequences that drive expression of homologous or orthologous genes from other organisms may be used. For example, a fungal promoter from a gene encoding cellobiohydrolase may be used.

[0071] Examples of other suitable promoters useful for directing the transcription of the nucleotide constructs of the present invention in a filamentous fungal host cell are promoters obtained from the genes for Aspergillus oryzae TAKA amylase, Rhizomucor miehei aspartic proteinase, Aspergillus niger neutral alpha-amylase, Aspergillus niger acid stable alpha-amylase, Aspergillus niger or Aspergillus awamori glucoamylase (glaA), Rhizomucor miehei lipase, Aspergillus oryzae alkaline protease, Aspergillus oryzae triose phosphate isomerase, Aspergillus nidulans acetamidase, and Fusarium oxysporum trypsin-like protease (WO 96/00787, which is incorporated herein by reference), as well as the NA2-tpi promoter (a hybrid of the promoters from the genes for Aspergillus niger neutral alpha-amylase and Aspergillus oryzae triose phosphate isomerase), promoters such as cbh1, cbh2, egl1, egl2, pepA, hfb1, hfb2, xyn1, amy, and glaA (Nunberg et al., Mol. Cell Biol., 4:2306-2315 (1984), Boel et al., EMBO J. 3:1581-1585 ((1984) and EPA 137280, all of which are incorporated herein by reference), and mutant, truncated, and hybrid promoters thereof. In a yeast host, useful promoters can be from the genes for Saccharomyces cerevisiae enolase (ENO-1), Saccharomyces cerevisiae galactokinase (GAL1), Saccharomyces cerevisiae alcohol dehydrogenase/glyceraldehyde-3-phosphate dehydrogenase (ADH2/GAP), and Saccharomyces cerevisiae 3-phosphoglycerate kinase. Other useful promoters for yeast host cells are described by Romanos et al., 1992, Yeast 8:423-488. Promoters associated with chitinase production in fungi may be used. See, e.g., Blaiseau and Lafay, 1992, Gene 120243-248 (filamentous fungus Aphanocladium album); Limon et al., 1995, Curr. Genet, 28:478-83 (Trichoderma harzianum), both of which are incorporated herein by reference.

[0072] Promoters known to control expression of genes in prokaryotic or eukaryotic cells or their viruses that can be used in some embodiments of the invention include SV40 promoter, E. coli lac or trp promoter, phage lambda P_{L} promoter, tac promoter, T7 promoter, and the like. In bacterial host cells, suitable promoters include the promoters obtained from the E. coli lac operon, Streptomyces coelicolor agarase gene (dagA), Bacillus subtilis levansucranse gene (sacB), Bacillus licheniformis alpha-amylase gene (amyl), Bacillus stearothermophilus maltogenic amylase gene (amyM), Bacillus amyloliquefaciens alpha-amylase gene (amyQ), Bacillus subtilis xylA and xylB genes and prokaryotic β-lactamase gene.

[0073] An expression vector can contain other sequences, for example, an expression vector may optionally contain a ribosome binding site for translation initiation, and a transcription terminator. The vector also optionally includes appropriate sequences for amplifying expression, e.g., an enhancer.

[0074] In addition, expression vectors that encodes a cellulose degradation enzyme of the invention optionally contain one or more selectable marker genes to provide a phenotypic trait for selection of transformed host cells. Suitable marker genes include those coding for antibiotic resistance such as, ampicillin (ampR), kanamycin, chloramphenicol, or tetracycline resistance. Further examples include the antibiotics spectinomycin (e.g., the aada gene); streptomycin, e.g., the streptomycin phosphotransferase (SPT) gene coding for streptomycin resistance; the neomycin phosphotransferase (NPTII) gene encoding kanamycin or geneticin resistance; the hygromycin phosphotransferase (HPT) gene coding for hygromycin resistance. Additional selectable marker genes include dihydrofolate reductase or neomycin resistance for eukaryotic cell culture, and tetracycline or ampicillin resistance in E. coli. Selecteable markers for fungi include markers for resistance to HPT, phleomycin, benomyl, and acetamide.

### Synthesis and Manipulation of LignoCellulose Degradation Enzyme Polynucleotides

[0075] Polynucleotides encoding a lignocellulose degradation enzyme of Table 1 or Table 2 can be prepared using methods that are well known in the art. For example, individual oligonucleotides may be individually synthesized, then joined (e.g., by enzymatic or chemical ligation methods, or polymerase-mediated methods) to form essentially any desired continuous sequence. Chemical synthesis of oligonucleotides can be performed using, for example, the classical phosphoramidite method described by Beaucage, et al., 1981, Tetrahedron Letters, 22:1859-69, or the method described by Matthes, et al., 1984, EMBO J. 3:801-05, both of which are incorporated herein by reference. These methods are typically practiced in automated synthetic methods. In a chemical synthesis method, oligonucleotides are synthesized, e.g., in an automatic DNA synthesizer, purified, annealed, ligated and cloned in appropriate vectors. Further, essentially any nucleic acid can be custom ordered from any of a variety of commercial sources.

[0076] General texts that describe molecular biological techniques that are useful herein, including the use of vectors, promoters, protocols sufficient to direct persons of skill through in vitro amplification methods, including the polymerase chain reaction (PCR) and the ligase chain reaction (LCR), and many other relevant methods, include Berger and Kimmel, Guide to Molecular Cloning Techniques, Methods in Enzymology volume 152 Academic Press, Inc., San Diego, Calif. (Berger); Sambrook et al., Molecular Cloning—A Laboratory Manual (2nd Ed.), Vol. 1-3, Cold Spring Harbor Laboratory, Cold Spring Harbor, N.Y., 1989 (“Sambrook”) and Current Protocols in Molecular Biology, F. M. Ausubel et al., eds., Current Protocols, a joint venture between Greene Publishing Associates, Inc. and John Wiley & Sons, Inc., (supplemented through 1999) (“Ausubel”), all of which are incorporated herein by reference. Reference is made to Berger, Sambrook, and Ausubel, as well as Mullis et al., (1987) U.S. Pat. No. 4,683,202; PCR Protocols A Guide to Methods and Applications (Innis et al. eds) Academic Press Inc. San Diego, Calif. (1990) (Innis); Arnheim & Levinson (Oct. 1, 1990) C&EN 36-47; The Journal Of NIH Research (1991) 3, 81-94; (Kwoh et al. (1989) Proc. Natl. Acad. Sci. USA 86, 1173; Guatelli et al. (1990) Proc. Natl. Acad. Sci. USA 87, 1874; Lomell et al. (1989) J. Clin. Chem 35, 1826; Landegren et al., (1988) Science 241, 1077-1080; Van Brunt (1990) Biotechnology 8, 291-294; Wu and Wallace, (1989) Gene 4, 560; Barringer et al. (1990) Gene 89, 117, and Sooknanan and Malek (1995) Biotechnology 13: 563-564, all of which are incorporated herein by reference. Methods for cloning in vitro amplified nucleic acids are described in Wallace et al., U.S. Pat. No. 5,426,039, which is incorporated herein by reference.

### Expression Hosts

[0077] The present invention also provides engineered (recombinant) host cells that are transformed with an expression vector or DNA construct encoding a lignocellulose degradation enzyme of Table 1 or Table 2. As used herein, a genetically modified or recombinant host cell includes the progeny of said host cell that comprises a lignocellulose degradation enzyme polynucleotide that encodes a recombinant polypeptide of Table 1 or Table 2. In some embodiments, the genetically modified or recombinant host cell is a eukaryotic cell. Suitable eukaryotic host cells include, but are not limited to, fungal cells, algal cells, insect cells, and plant cells. In some cases host cells may be modified to increase protein expression, secretion or stability, or to confer other desired characteristics. Cells (e.g., fungi) that have been mutated or selected to have low protease activity are particularly useful for expression. For example, C1 strains in which the alp1 (alkaline protease) locus has been deleted or disrupted may be used. Many expression hosts can be employed in the invention, including fungal host cell, such as yeast cells and filamentous fungal cells; algal host cells; and prokaryotic cells, including gram positive, gram negative and gram-variable bacterial cells. Examples are listed below.

[0078] Suitable fungal host cells include, but are not limited to, Ascomycota, Basidiomycota, Deuteromycota, Zygomycota, Fungi imperfecti. Particularly preferred fungal host cells are yeast cells and filamentous fungal cells. The filamentous fungal host cells of the present invention include all filamentous forms of the subdivision Eumycotina and Oomycota. (see, for example, Hawksworth et al., In Ainsworth and Bisby's Dictionary of The Fungi, 8^{th} edition, 1995, CAB International, University Press, Cambridge, UK, which is incorporated herein by reference). Filamentous fungi are characterized by a vegetative mycelium with a cell wall composed of chitin, cellulose and other complex polysaccharides. The filamentous fungal host cells of the present invention are morphologically distinct from yeast.

[0079] In some embodiments the filamentous fungal host cell may be a cell of a species of, but not limited to Achlya, Acremonium, Aspergillus, Aureobasidium, Bjerkandera, Ceriporiopsis, Cephalosporium, Chrysosporium, Cochliobolus, Corynascus, Cryphonectria, Cryptococcus, Coprinus, Coriolus, Diplodia, Endothia, Fusarium, Gibberella, Gliocladium, Humicola, Hypocrea, Myceliophthora, Mucor, Neurospora, Penicillium, Podospora, Phlebia, Piromyces, Pyricularia, Rhizomucor, Rhizopus, Schizophyllum, Scytalidium, Sporotrichum, Talaromyces, Thermoascus, Thielavia, Trametes, Tolypocladium, Trichoderma, Verticillium, Volvariella, or teleomorphs, or anamorphs, and synonyms or taxonomic equivalents thereof.

[0080] In some embodiments of the invention, the filamentous fungal host cell is of the Aspergillus species, Ceriporiopsis species, Chrysosporium species, Corynascus species, Fusarium species, Humicola species, Neurospora species, Penicillium species, Tolypocladium species, Tramates species, or Trichoderma species.

[0081] In some embodiments of the invention, the filamentous fungal host cell is of the Trichoderma species, e.g., T. longibrachiatum, T. viride (e.g., ATCC 32098 and 32086), Hypocrea jecorina or T. reesei (NRRL 15709, ATTC 13631, 56764, 56765, 56466, 56767 and RL-P37 and derivatives thereof—See Sheir-Neiss et al., 1984, Appl. Microbiol. Biotechnology, 20:46-53, which is incorporated herein by reference), T. koningii, and T. harzianum. In addition, the term “Trichoderma” refers to any fungal strain that was previously classified as Trichoderma or currently classified as Trichoderma.

[0082] In some embodiments of the invention, the filamentous fungal host cell is of the Aspergillus species, e.g., A. awamori, A. fumigatus, A. japonicus, A. nidulans, A. niger, A. aculeatus, A. foetidus, A. oryzae, A. sojae, and A. kawachi. (Reference is made to Kelly and Hynes, 1985, EMBO J. 4, 475479; NRRL 3112, ATCC 11490, 22342, 44733, and 14331; Yelton et al., 1984, Proc. Natl. Acad. Sci. USA, 81, 1470-1474; Tilburn et al., 1982, Gene 26, 205-221; and Johnston et al., 1985, EMBO J. 4, 1307-1311, all of which are incorporated herein by reference).

[0083] In some embodiments of the invention, the filamentous fungal host cell is of the Fusarium species, e.g., F. bactridioides, F. cerealis, F. crookwellense, F. culmorum, F. graminearum, F. graminum. F. oxysporum, F. roseum, and F. venenatum. In some embodiments of the invention, the filamentous fungal host cell is of the Neurospora species, e.g., N. crassa. Reference is made to Case, M. E. et al., (1979) Proc. Natl. Acad. Sci. USA, 76, 5259-5263; U.S. Pat. No. 4,486,553; and Kinsey, J. A. and J. A. Rambosek (1984) Molecular and Cellular Biology 4, 117-122, all of which are incorporated herein by reference. In some embodiments of the invention, the filamentous fungal host cell is of the Humicola species, e.g., H. insolens, H. grisea, and H. lanuginosa. In some embodiments of the invention, the filamentous fungal host cell is of the Mucor species, e.g., M. miehei and M. circinelloides. In some embodiments of the invention, the filamentous fungal host cell is of the Rhizopus species, e.g., R. oryzae and R. niveus. In some embodiments of the invention, the filamentous fungal host cell is of the Penicillum species, e.g., P. purpurogenum, P. chrysogenum, and P. verruculosum. In some embodiments of the invention, the filamentous fungal host cell is of the Thielavia species, e.g., T. terrestris. In some embodiments of the invention, the filamentous fungal host cell is of the Tolypocladium species, e.g., T. inflatum and T. geodes. In some embodiments of the invention, the filamentous fungal host cell is of the Trametes species, e.g., T. villosa and T. versicolor.

[0084] In some embodiments of the invention, the filamentous fungal host cell is of the Chrysosporium species, e.g., C1, C. lucknowense, C. keratinophilum, C. tropicum, C. merdarium, C. inops, C. pannicola, and C. zonatum. In a particular embodiment the host is C1.

[0085] In the present invention a yeast host cell may be a cell of a species of, but not limited to Candida, Hansenula, Saccharomyces, Schizosaccharomyces, Pichia, Kluyveromyces, and Yarrowia. In some embodiments of the invention, the yeast cell is Hansenula polymorpha, Saccharomyces cerevisiae, Saccaromyces carlsbergensis, Saccharomyces diastaticus, Saccharomyces norbensis, Saccharomyces kluyveri, Schizosaccharomyces pombe, Pichia pastoris, Pichia finlandica, Pichia trehalophila, Pichia kodamae, Pichia membranaefaciens, Pichia opuntiae, Pichia thermotolerans, Pichia salictaria, Pichia quercuum, Pichia pijperi, Pichia stipitis, Pichia methanolica, Pichia angusta, Kluyveromyces lactis, Candida albicans, and Yarrowia lipolytica.

[0086] In some embodiments on the invention, the host cell is an algal such as, Chlamydomonas (e.g., C. reinhardtii) and Phormidium (P. sp. ATCC29409).

[0087] In other embodiments, the host cell is a prokaryotic cell. Suitable prokaryotic cells include gram positive, gram negative and gram-variable bacterial cells. The host cell may be a species of, but not limited to, Agrobacterium, Alicyclobacillus, Anabaena, Anacystis, Acinetobacter, Acidothermus, Arthrobacter, Azobacter, Bacillus, Bifidobacterium, Brevibacterium, Butyrivibrio, Buchnera, Campestris, Camplyobacter, Clostridium, Corynebacterium, Chromatium, Coprococcus, Escherichia, Enterococcus, Enterobacter, Erwinia, Fusobacterium, Faecalibacterium, Francisella, Flavobacterium, Geobacillus, Haemophilus, Helicobacter, Klebsiella, Lactobacillus, Lactococcus, Ilyobacter, Micrococcus, Microbacterium, Mesorhizobium, Methylobacterium, Mycobacterium, Neisseria, Pantoea, Pseudornonas, Prochlorococcus, Rhodobacter, Rhodopseudomonas, Rhodopseudomonas, Roseburia, Rhodospirillum, Rhodococcus, Scenedesmus, Streptomyces, Streptococcus, Synechococcus, Saccharomonospora, Staphylococcus, Serratia, Salmonella, Shigella, Thermoanaerobacterium, Tropheryma, Tularensis, Temecula, Thermosynechococcus, Thermococcus, Ureaplasma, Xanthomonas, Xylella, Yersinia and Zymomonas.

[0088] In some embodiments, the host cell is a species of Agrobacterium, Acinetobacter, Azobacter, Bacillus, Bifidobacterium, Buchnera, Geobacillus, Campylobacter, Clostridium, Corynebacterium, Escherichia, Enterococcus, Erwinia, Flavobacterium, Lactobacillus, Lactococcus, Pantoea, Pseudomonas, Staphylococcus, Salmonella, Streptococcus, Streptomyces, and Zymomonas.

[0089] In yet other embodiments, the bacterial host strain is non-pathogenic to humans. In some embodiments the bacterial host strain is an industrial strain. Numerous bacterial industrial strains are known and suitable in the present invention.

[0090] In some embodiments of the invention the bacterial host cell is of the Agrobacterium species, e.g., A. radiobacter, A. rhizogenes, and A. rubi. In some embodiments of the invention the bacterial host cell is of the Arthrobacter species, e.g., A. aurescens, A. citreus, A. globformis, A. hydrocarboglutamicus, A. mysorens, A. nicotianae, A. paraffineus, A. protophonniae, A. roseoparqffinus, A. sulfureus, and A. ureafaciens. In some embodiments of the invention the bacterial host cell is of the Bacillus species, e.g., B. thuringiensis, B. anthracis, B. megaterium, B. subtilis, B. lentus, B. circulans, B. pumilus, B. lautus, B. coagulans, B. brevis, B. firmus, B. alkaophius, B. licheniformis, B. clausii, B. stearothermophilus, B. halodurans and B. amyloliquefaciens. In particular embodiments, the host cell will be an industrial Bacillus strain including but not limited to B. subtilis, B. pumilus, B. licheniformis, B. megaterium, B. clausii, B. stearothermophilus and B. amyloliquefaciens. Some preferred embodiments of a Bacillus host cell include B. subtilis, B. licheniformis, B. megaterium, B. stearothermophilus and B. amyloliquefaciens. In some embodiments the bacterial host cell is of the Clostridium species, e.g., C. acetobutylicum, C. tetani E88, C. lituseburense, C. saccharobutylicum, C. perfringens, and C. beijerinckii. In some embodiments the bacterial host cell is of the Corynebacterium species e.g., C. glutamicum and C. acetoacidophilum. In some embodiments the bacterial host cell is of the Escherichia species, e.g., E. coli. In some embodiments the bacterial host cell is of the Erwinia species, e.g., E. uredovora, E. carotovora, E. ananas, E. herbicola, E. punctata, and E. terreus. In some embodiments the bacterial host cell is of the Pantoea species, e.g., P. citrea, and P. agglomerans. In some embodiments the bacterial host cell is of the Pseudomonas species, e.g., P. putida, P. aeruginosa, P. mevalonii, and P. sp. D-01 10. In some embodiments the bacterial host cell is of the Streptococcus species, e.g., S. equisimiles, S. pyogenes, and S. uberis. In some embodiments the bacterial host cell is of the Streptomyces species, e.g., S. ambofaciens, S. achromogenes, S. avermitilis, S. coelicolor, S. aureofaciens, S. aureus, S. fungicidicus, S. griseus, and S. lividans. In some embodiments the bacterial host cell is of the Zymomonas species, e.g., Z. mobilis, and Z. lipolytica.

[0091] Strains that may be used in the practice of the invention including both prokaryotic and eukaryotic strains, are readily accessible to the public from a number of culture collections such as American Type Culture Collection (ATCC), Deutsche Sammlung von Mikroorganismen und Zellkulturen GmbH (DSM), Centraalbureau Voor Schimmelcultures (CBS), and Agricultural Research Service Patent Culture Collection, Northern Regional Research Center (NRRL).

[0092] Host cells may be genetically modified to have characteristics that improve protein secretion, protein stability or other properties desirable for expression and/or secretion of a protein. Genetic modification can be achieved by genetic engineeriing techniques or using classical microbiological techniques, such as chemical or UV mutagenesis and subsequent selection. A combination of recombinant modification and classical selection techniques may be used to produce the organism of interest. Using recombinant technology, nucleic acid molecules can be introduced, deleted, inhibited or modified, in a manner that results in increased yields of a lignocellulose degradation enzyme of the invention, e.g., a glycohydrolase of the invention, within the organism or in the culture. For example, knock out of pyr5 function results in a cell with a pyrimidine deficient phenotype.

### Transformation

[0093] Introduction of a vector or DNA construct into a host cell can be effected by calcium phosphate transfection, DEAE-Dextran mediated transfection, electroporation, or other common techniques (See Davis et al., 1986, Basic Methods in Molecular Biology, which is incorporated herein by reference). Transformation of C1 host cells is known in the art (see, e.g., US 2008/0194005 which is incorporated herein by reference).

### Culture Conditions

[0094] The engineered host cells can be cultured in conventional nutrient media modified as appropriate for activating promoters, selecting transformants, or amplifying the lignocellulose degradation enzyme polynucleotide. Culture conditions, such as temperature, pH and the like, are those previously used with the host cell selected for expression, and will be apparent to those skilled in the art. As noted, many references are available for the culture and production of many cells, including cells of bacterial, plant, animal (especially mammalian) and archaebacterial origin. See e.g., Sambrook, Ausubel, and Berger (all supra), as well as Freshney (1994) Culture of Animal Cells, a Manual of Basic Technique, third edition, Wiley-Liss, New York and the references cited therein; Doyle and Griffiths (1997) Mammalian Cell Culture: Essential Techniques John Wiley and Sons, NY; Humason (1979) Animal Tissue Techniques, fourth edition W.H. Freeman and Company; and Ricciardelli, et al., (1989) In vitro Cell Dev. Biol. 25:1016-1024, all of which are incorporated herein by reference. For plant cell culture and regeneration, Payne et al. (1992) Plant Cell and Tissue Culture in Liquid Systems John Wiley & Sons, Inc. New York, N.Y.; Gamborg and Phillips (eds) (1995) Plant Cell, Tissue and Organ Culture; Fundamental Methods Springer Lab Manual, Springer-Verlag (Berlin Heidelberg New York); Jones, ed. (1984) Plant Gene Transfer and Expression Protocols, Humana Press, Totowa, N.J. and Plant Molecular Biology (1993) R. R. D. Croy, Ed. Bios Scientific Publishers, Oxford, U.K. ISBN 0 12 198370 6, all of which are incorporated herein by reference. Cell culture media in general are set forth in Atlas and Parks (eds.) The Handbook of Microbiological Media (1993) CRC Press, Boca Raton, Fla., which is incorporated herein by reference. Additional information for cell culture is found in available commercial literature such as the Life Science Research Cell Culture Catalogue (1998) from Sigma-Aldrich, Inc (St Louis, Mo.) (“Sigma-LSRCCC”) and, for example, The Plant Culture Catalogue and supplement (1997) also from Sigma-Aldrich, Inc (St Louis, Mo.) (“Sigma-PCCS”), all of which are incorporated herein by reference.

[0095] Culture conditions for C1 host cells are known in the art and can be readily determined by one of skill. See, e.g., US 2008/0194005, US 20030187243, WO 2008/073914 and WO 01/79507, which are incorporated herein by reference.

### V. Production and Recovery of Lignocellulose Degradation Enzyme Polypeptides

[0096] The present invention is directed to a method of making a lignocellulose degradation enzyme having an amino acid sequence of Table 1 or Table 2, the method comprising providing a host cell transformed with a polynucleotide encoding the enzyme, e.g., a nucleic acid of Table 1 or Table 2; culturing the transformed host cell in a culture medium under conditions in which the host cell expresses the encoded enzyme; and optionally recovering or isolating the expressed lignocellulose degradation ezyme, or recovering or isolating the culture medium containing the expressed enzyme. The method further provides optionally lysing the transformed host cells after expressing the lignocellulose degradation enzyme and optionally recovering or isolating the expressed enzyme from the cell lysate.

[0097] In a further embodiment, the present invention provides a method of over-expressing (i.e., making,) a lignocellulose degradation enzyme having an amino acid sequence of Table 1 or Table 2 comprising: (a) providing a recombinant C1 host cell comprising a nucleic acid construct, wherein the nucleic acid construct comprises a polynucleotide sequence that encodes a C1 lignocellulose degradation enzyme of Table 1 or Table 2 and the nucleic acid construct optionally also comprises a polynucleotide sequence encoding a signal peptide at the amino terminus of the lignocellulose degradation enzyme, wherein the polynucleotide sequence encoding the enzyme and optional signal peptide is operably linked to a heterologous promoter; and (b) culturing the host cell in a culture medium under conditions in which the host cell expresses the encoded lignocellulose degradation enzyme, wherein the level of expression of protein from the host cell is greater, preferably at least about 2-fold greater, than that from wildtype C1 cultured under the same conditions. The signal peptide employed in this method may be any heterologous signal peptide known in the art or may be a wildtype signal peptide of a sequence set forth in Table 1 or Table 2. In some embodiments, the level of overexpression is at least about 5-fold, 10-fold, 12-fold, 15-fold, 20-fold, 25-fold, 30-fold, or 35-fold greater than expression of the enzyme from wildtype C1.

[0098] Typically, recovery or isolation of the lignocellulose degradation polypeptide is from the host cell culture medium, the host cell or both, using protein recovery techniques that are well known in the art, including those described herein. Cells are typically harvested by centrifugation, disrupted by physical or chemical means, and the resulting crude extract may be retained for further purification. Microbial cells employed in expression of proteins can be disrupted by any convenient method, including freeze-thaw cycling, sonication, mechanical disruption, or use of cell lysing agents, or other methods, which are well known to those skilled in the art.

[0099] The resulting polypeptide may be recovered/isolated and optionally purified by any of a number of methods known in the art. For example, the lignocellulose degradation polypeptide may be isolated from the nutrient medium by conventional procedures including, but not limited to, centrifugation, filtration, extraction, spray-drying, evaporation, chromatography (e.g., ion exchange, affinity, hydrophobic interaction, chromatofocusing, and size exclusion), or precipitation. Protein refolding steps can be used, as desired, in completing the configuration of the mature protein. Finally, high performance liquid chromatography (HPLC) can be employed in the final purification steps. For example, purification of a glycohydrolase is described in US patent publication US 2007/0238155, incorporated herein by reference. In addition to the references noted supra, a variety of purification methods are well known in the art, including, for example, those set forth in Sandana (1997) Bioseparation of Proteins, Academic Press, Inc.; Bollag et al. (1996) Protein Methods, 2^{nd} Edition, Wiley-Liss, NY; Walker (1996) The Protein Protocols Handbook Humana Press, NJ; Harris and Angal (1990) Protein Purification Applications: A Practical Approach, IRL Press at Oxford, Oxford, England; Harris and Angal Protein Purification Methods: A Practical Approach, IRL Press at Oxford, Oxford, England; Scopes (1993) Protein Purification: Principles and Practice 3^{rd} Edition, Springer Verlag, NY; Janson and Ryden (1998) Protein Purification: Principles, High Resolution Methods and Applications, Second Edition, Wiley-VCH, NY; and Walker (1998) Protein Protocols on CD-ROM, Humana Press, NJ, all of which are incorporated herein by reference.

[0100] Immunological methods may also be used to purify a lignocellulose degradation polypeptide. In one approach, an antibody raised against the enzyme using conventional methods is immobilized on beads, mixed with cell culture media under conditions in which the enzyme is bound, and precipitated. In a related approach immunochromatograpy is used. In some embodiments, purification is achieved using protein tags to isolate recombinantly expressed protein.

### VI. C1 Cells Having Absent or Decreased Expression of a Lignocellulose Degradation Enzyme

[0101] In a further aspect, the invention provides C1 cells in which expression of one or more lignocellulose degradation enzymes having a sequence set forth in Table 1 or Table 2 is inhibited. In the context of this invention, the term “inhibited” refers to a reduction in the level of the enzyme in an engineered C1 cell in which a nucleic acid sequence encoding a lignocellulose degradation enzyme has been targeted to decrease expression in comparison to wildtype cells. In typical embodiments, the genomic sequence expressing a target lignocellulose degradation enzyme of the invention is knocked out in C1 cells and expression of the enzyme is absent in the engineered cells.

[0102] Methods for introducing genetic mutations into C1 genes and selecting cells with reduced or absent expression of the protein of interest are well known. For instance, C1 can be treated with a mutagenic chemical substance, according to standard techniques. Such chemical substances include, but are not limited to, the following: NTG, diethyl sulfate, ethylene imine, ethyl methanesulfonate and N-nitroso-N-ethylurea. Alternatively, ionizing radiation from sources such as X-rays or gamma rays can be used, or non-ionizing UV radiation can be employed. In other embodiments, insertional or transposon mutagenesis can be performed.

[0103] Alternatively, homologous recombination can be used to induce targeted gene modifications by specifically targeting a lignocellulose degradation enzyme gene in vivo to suppress expression (see, generally, Grewal and Klar, Genetics 146: 1221-1238 (1997) and Xu et al., Genes Dev. 10: 2411-2422 (1996)). In applying homologous recombination technology to the genes of the invention, mutations in selected portions of a lignocellulose degradation enzyme gene sequences are made in vitro and then introduced into the C1 host using standard techniques. The mutated gene will interact with the target wild-type gene in such a way that homologous recombination and targeted replacement of the wild-type gene occurs in the host cells, resulting in suppression of activity of the protein encoded by the gene.

[0104] In other embodiments, insertional mutagenesis can be used to mutagenize a population of host cells that can subsequently be screened.

[0105] In some embodiments, the invention provides a transgenic C1 cell that is characterized by reduced lignocellulose degradation enzyme expression due to suppression of expression of a nucleic acid molecule encoding a lignocellulose degradation polypeptide. Such a cell may comprise an expression cassette stably transformed into the cell, such that that expression is inhibited constitutively or under certain conditions, e.g., when an inducible promoter is used.

[0106] A number of methods can be used to inhibit gene expression of a lignocellulose degradation enzyme of Table 1 or Table 2. For instance, siRNA, antisense, or ribozyme technology can be conveniently used that targets a nucleic acid sequence that encodes a lignocellulose degradation enzyme of Table 1 or Table 2. Such techniques are well known in the art. Thus, the invention further provides a sequence complementary to the nucleotide sequence of the lignocellulose enzyme gene that is capable of hybridizing to the mRNA produced in the cell to inhibit the amount of protein expressed.

[0107] C1 cells manipulated to inhibit expression of a lignocellulose degradation enzyme of the invention can be screened for decreased gene expression using standard assays to determine the levels of RNA and/or protein expression, which assays include quantitative RT-PCR, immunoassays and/or enzymatic activity assays. Such C1 cells can be used as host cells for the expression of native and/or heterologous polypeptides.

[0108] Thus, in a further aspect, the invention additionally provides a recombinant host cell comprising a disruption or deletion of a polynucleotide sequence identified in Table 1 or Table 2, e.g., Table 2, wherein the disruption or deletion inhibits expression of the lignocellulose degradation enzyme encoded by the polynucleotide sequence. In some embodiments, the recombinant host cell comprises an anti-sense RNA or iRNA that is complementary to a polynucleotide sequence identified in Table 1 or Table 2.

### VII. Methods of Using Lignocellulose Degration Enzymes and Cells Expressing the Enzymes

[0109] As described supra, lignocellulose degradation polypeptides of the present invention can be used to degrade cellulosic biomass, e.g., a glycoside hydrolase of Table 1 or Table 2 can be used to catalyze the hydrolysis of a sugar dimer with the release of the corresponding sugar monomer. In some embodiments, a lignocellulose degradation polypeptide of the invention participates in the degradation of cellulosic biomass to obtain a carbohydrate not by directly hydrolyzing cellulose or hemicellulose to obtain the carbohydrate, but by generating a degradation product that is more readily hydrolyzed to a carbohydrate by cellulases and accessory proteins. For example, lignin can be broken down using a lignocellulose degradation enzyme of the invention, such as a laccase, to provide an intermediate in which more cellulose or hemicellulose is accessible for degradation by cellulases and glycoside hydrolases. Various other enzymes, e.g., endoglucanases and cellobiohydrolases catalyze the hydrolysis of insoluble cellulose to cellooligosaccharides while β-glucosidases convert the oligosaccharides to glucose. Similarly, xylanases, together with other enzymes such as α-L-arabinofuranosidases, ferulic and acetylxylan esterases and β-xylosidases, catalyze the hydrolysis of hemicelluloses.

[0110] The present invention thus further provides compositions that are useful for the enzymatic conversion of a cellulosic biomass to soluble carbohydrates. For example, one or more lignocellulose degradation polypeptides of the present invention may be combined with one or more other enzymes and/or an agent that participates in lignocellulose degradation. The other enzyme(s) may be a different glycoside hydrolase or an accessory protein such as an esterase, oxidase, or the like; or an ortholog, e.g., from a different organism of an enzyme of the invention.

### Cellulosic Biomass Degradation Mixtures

[0111] For example, in some embodiments, a glycoside hydrolase lignocellulose degradation enzyme set forth in Table 1 or Table 2 may be combined with other glycoside hydrolases to form a mixture or composition comprising a recombinant lignocellulose degradation enzyme of the present invention and a C1 cellulase or other filamentous fungal cellulase. The mixture or composition may include cellulases selected from CBH, EG and BG cellulases (e.g., cellulases from a Trichoderma sp. (e.g. Trichoderma reesei and the like); an Acidothermus sp. (e.g., Acidothermus cellulolyticus, and the like); an Aspergillus sp. (e.g., Aspergillus nidulans, Aspergillus niger, Aspergillus oryzae, and the like); a Humicola sp. (e.g., Humicola grisea, and the like); a Chrysosporium sp., as well as cellulases derived from any of the host cells described under the section entitled “Expression Hosts”, supra).

[0112] The mixture may additionally comprise one or more accessory proteins, e.g., an accessory enzyme such as an esterase to de-esterify hemicellulose, set forth in Table 1 or Table 2; and/or accessory proteins from other organisms. The enzymes of the mixture work together resulting in hydrolysis of the hemicellulose and cellulose from a biomass substrate to yield soluble carbohydrates, such as, but not limited to, glucose and xylose (See Brigham et al., 1995, in Handbook on Bioethanol (C. Wyman ed.) pp 119-141, Taylor and Francis, Washington D.C., which is incorporated herein by reference). In some embodiments, mixtures of purified naturally occurring or recombinant enzymes are combined with cellulosic biomass or a product of lignocellulose hydrolysis. Alternatively or in addition, one or more cells producing naturally occurring or recombinant lignocellulose degradation enzymes may be used.

### Other Components of Enzyme Compositions

[0113] Lignocellulose degradation enzyme polypeptides of the present invention may be used in combination with other optional ingredients such as a buffer, a surfactant, and/or a scouring agent. A buffer may be used with an enzyme of the present invention (optionally combined with other cellulose degradation enzymes) to maintain a desired pH within the solution in which the enzyme is employed. The exact concentration of the buffer employed will depend on several factors which the skilled artisan can determine. Suitable buffers are well known in the art. A surfactant may further be used in combination with the enzymes of the present invention. Suitable surfactants include any surfactant compatible with the cellulose degradation enzyme of the invention and optional other enzymes being utilized. Exemplary surfactants include anionic, non-ionic, and ampholytic surfactants.

Production of Soluble Sugars from Cellulosic Biomass

[0114] Lignocellulose degradation enzymes of the present invention, as well as any composition, culture medium, or cell lysate comprising such polypeptides, may be used in the production of monosaccharides, disaccharides, or oligomers of a mono- or di-saccharide from biomass for subsequent use as chemical or fermentation feedstock or in chemical synthesis. As used herein, the term “cellulosic biomass” refers to living or dead biological material that contains a cellulose substrate, such as, for example, lignocellulose, hemicellulose, lignin, and the like. Therefore, the present invention provides a method of converting a biomass substrate to a degradation product, the method comprising contacting a culture medium or cell lysate containing a lignocellulose degradation polypeptide according to the invention, with the biomass substrate under conditions suitable for the production of the degradation product. The degradation product can be an end product such as a soluble sugar, or a product that undergoes further enzymatic conversion to an end product such as a soluble sugar. For example, a lignocellulose degradation enzyme of the invention may participate in a reaction that makes the cellulosic substrate more susceptible to hydrolysis so that the substrate is more readily hydrolyzed to fermentable sugars, such as glucose, cellobiose, xylose, xylulose, arabinose, mannose, galactose, and/or soluble oligosaccharides. The cellulosic substrate can be contacted with a composition, culture medium or cell lysate containing a lignocellulose degradation enzyme of Table 1 or Table 2 (and optionally other enzymes involved in breaking down cellulosic biomass) under conditions suitable for the production of a lignocellulose degradation product. In some embodiments, the contacting step may involve contacting the biomass with a composition, culture medium, or cell lysate containing an accessory protein such as an esterase, laccase, etc. set forth in Table 1 or Table 2. In some embodiments, the contacting step may involve contacting the biomass with a composition, culture medium, or cell lysate containing a glycosyl hydrolase set forth in Table 1 or Table 2.

[0115] Thus, the present invention provides a method for producing a lignocellulose degradation product by (a) providing a cellulosic biomass; and (b) contacting the biomass with at least one lignocellulose degradation enzyme that has an amino acid sequence set forth in Table 1 or Table 2 under conditions sufficient to form a reaction mixture for converting the biomass to a degradation product such as a soluble carbohydrate, or a product that is more readily hydrolyzed to a soluble carbohydrate. The cellulose degradation polypeptide may be used in such methods in either isolated form or as part of a composition, such as any of those described herein. The lignocellulose degradation enzyme may also be provided in cell culturing media or in a cell lysate. For example, after producing the lignocellulose degradation enzyme by culturing a host cell transformed with a lignocellulose degradation polynucleotide or vector of the present invention, the enzyme need not be isolated from the culture medium (i.e., if the enzyme is secreted into the culture medium) or cell lysate (i.e., if the enzyme is not secreted into the culture medium) or used in a purified form to be useful. Any composition, cell culture medium, or cell lysate containing a lignocellulose degradation enzyme of the present invention may be suitable for use in methods to degrade cellulosic biomass. Therefore, the present invention further provides a method for producing a degradation product of lignocellulose, such as a soluble sugar, a de-esterified cellulose biomass, etc. by: (a) providing a cellulosic biomass; and (b) contacting the biomass with a culture medium or cell lysate or composition comprising at least one lignocellulose degradation enzyme having an amino acid sequence of Table 1 or Table 2, e.g., a glycoside hydrolase of Table 1 or Table 2, under conditions sufficient to form a reaction mixture for converting the cellulosic biomass to the degradation product.

[0116] In some embodiments, the biomass includes cellulosic substrates including but not limited to, wood, wood pulp, paper pulp, corn stover, corn fiber, rice, paper and pulp processing waste, woody or herbaceous plants, fruit or vegetable pulp, distillers grain, grasses, rice hulls, wheat straw, cotton, hemp, flax, sisal, corn cobs, sugar cane bagasse, switch grass and mixtures thereof. The biomass may optionally be pretreated to increase the susceptibility of cellulose to hydrolysis using methods known in the art such as chemical, physical and biological pretreatments (e.g., steam explosion, pulping, grinding, acid hydrolysis, solvent exposure, and the like, as well as combinations thereof).

[0117] Soluble sugars produced by the methods of the present invention may be used to produce an alcohol (such as, for example, ethanol, butanol, and the like). The present invention therefore provides a method of producing an alcohol, where the method comprises (a) providing a soluble sugar produced using a lignocellulose degradation polypeptide of the present invention in the methods described supra; (b) contacting the soluble sugar with a fermenting microorganism to produce the alcohol or other metabolic product; and (c) recovering the alcohol or other metabolic product.

[0118] In some embodiments, the lignocellulose degradation polypeptide of the present invention, or composition, cell culture medium, or cell lysate containing the polypeptide, may be used to catalyze the hydrolysis of a biomass substrate to a soluble sugar in the presence of a fermenting microorganism such as a yeast (e.g., Saccharomyces sp., such as, for example, S. cerevisiae, Zymomonas sp., E. coli, Pichia sp., and the like) or other C5 or C6 fermenting microorganisms that are well known in the art, to produce an end-product such as ethanol. In this simultaneous saccharification and fermentation (SSF) process the soluble sugars (e.g., glucose and/or xylose) are removed from the system by the fermentation process.

[0119] The soluble sugars produced by the use of a lignocellulose degradation polypeptide of the present invention may also be used in the production of other end-products, such as, for example, acetone, an amino acid (e.g., glycine, lysine, and the like), an organic acid (e.g., lactic acid, and the like), glycerol, a diol (e.g., 1,3 propanediol, butanediol, and the like) and animal feeds.

[0120] One of skill in the art will readily appreciate that lignocellulose degradation polypeptide compositions of the present invention may be used in the form of an aqueous solution or a solid concentrate. When aqueous solutions are employed, the enzyme solution can easily be diluted to allow accurate concentrations. A concentrate can be in any form recognized in the art including, for example, liquids, emulsions, suspensions, gel, pastes, granules, powders, an agglomerate, a solid disk, as well as other forms that are well known in the art. Other materials can also be used with or included in the enzyme composition of the present invention as desired, including stones, pumice, fillers, solvents, enzyme activators, and anti-redeposition agents depending on the intended use of the composition.

[0121] The foregoing and other aspects of the invention may be better understood in connection with the following non-limiting examples.

### VIII. Examples

[0122] Tables 1 and 2 provide C1 lignocellulose degradation enzymes that were identified from the C1 genome sequence. The Pfam domains were identified using “PFAM v.24”, developed by the Wellcome Trust Sanger Institute, which is available at the web address “pfam.sanger.ac.uk/about” preceded by “http://”.

[0123] Various genes were selected for over-expression. The genes were cloned as genomic DNA fragments by PCR with flanking primers and cloned into an expression construct driven with the C1 chi1 promoter and cbh1a terminator. The constructs were transformed either into a C1 strain DC9 or a C1 strain DC18. A selection marker, typically Phleomycin, was used to select transformants. Transformants were fermented and the produced supernatant was analyzed with SDS-PAGE. The results showed that the various genes were over-expressed in the C1 strains. The over expressed genes were SEQ ID NO:127 (CBDH), SEQ ID NO:51 (arabinogalactanase), SEQ ID NO: 121 (ferulic acid esterase), SEQ ID NO:63 (endoarabinase), SEQ ID NO:167, SEQ ID NO:173 (CBM), SEQ ID NO: 177 (muc-lac enzyme), SEQ ID NO:447 (acetylxylan esterase), SEQ ID NO:25 (cbh), SEQ ID NO:575, and SEQ ID NO:321.

[0124] While the present invention has been described with reference to the specific embodiments thereof, it should be understood by those skilled in the art that various changes can be made and equivalents can be substituted without departing from the scope of the invention. In addition, many modifications can be made to adapt a particular situation, material, composition of matter, process, process step or steps, to achieve the benefits provided by the present invention without departing from the scope of the present invention. All such modifications are intended to be within the scope of the claims appended hereto.

[0125] All publications and patent documents cited herein are incorporated herein by reference as if each such publication or document was specifically and individually indicated to be incorporated herein by reference. Citation of publications and patent documents is not intended as an indication that any such document is pertinent prior art, nor does it constitute any admission as to the contents or date of the same.

TABLE 1

| | | polypeptide | | | |
|---|---|---|---|---|---|
| nucleic acid | amino acid | length (no. | signal | | |
| seq no | seq id no. | amino acids) | peptide | Pfam domains | Functional class |
| 1 | 2 | 454 | YES | GH72-GH5(low score) | glycohydrolase |
| 3 | 4 | 460 | YES | GH72--GH5(low score) | glycohydrolase |
| 5 | 6 | 764 | NO | GH5 | glycohydrolase |
| 7 | 8 | 356 | YES | GH3 | glycohydrolase |
| 9 | 10 | 476 | NO | GH1--GH5 | glycohydrolase |
| 11 | 12 | 410 | YES | GH5--GH42--GH2_C | glycohydrolase |
| 13 | 14 | 760 | YES | GH3--GH3_C | glycohydrolase |
| 15 | 16 | 456 | YES | GH7 | glycohydrolase |
| 17 | 18 | 128 | YES | GH7 | glycohydrolase |
| 19 | 20 | 464 | YES | GH7--CBM_1 | glycohydrolase |
| 21 | 22 | 222 | YES | GH11 | glycohydrolase |
| 23 | 24 | 326 | YES | GH10 | glycohydrolase |
| 25 | 26 | 395 | YES | GH6 | glycohydrolase |
| 27 | 28 | 225 | YES | GH45 | glycohydrolase |
| 29 | 30 | 482 | YES | CBM_1--GH6 | glycohydrolase |
| 31 | 32 | 278 | YES | GH11--CBM_1 | glycohydrolase |
| 33 | 34 | 321 | YES | GH62 | glycohydrolase |
| 35 | 36 | 228 | YES | GH11 | glycohydrolase |
| 37 | 38 | 733 | YES | GH3--GH3_C | glycohydrolase |
| 39 | 40 | 247 | YES | GH12 | glycohydrolase |
| 41 | 42 | 680 | NO | GH15 | glycohydrolase |
| 43 | 44 | 225 | YES | GH25 | glycohydrolase |
| 45 | 46 | 405 | YES | GH17 | glycohydrolase |
| 47 | 48 | 628 | YES | GH76--GH76 | glycohydrolase |
| 49 | 50 | 351 | NO | GH18 | glycohydrolase |
| 51 | 52 | 350 | YES | GH53 | glycohydrolase |
| 53 | 54 | 280 | YES | GH16--SKN1 | glycohydrolase |
| 55 | 56 | 601 | YES | GH47 | glycohydrolase |
| 57 | 58 | 483 | YES | GH72 | glycohydrolase |
| 59 | 60 | 1052 | NO | GH63 | glycohydrolase |
| 61 | 62 | 669 | NO | GH31 | glycohydrolase |
| 63 | 64 | 321 | YES | GH43 | glycohydrolase |
| 65 | 66 | 254 | YES | Polysacc_deac_1--GH57 | glycohydrolase |
| 67 | 68 | 897 | NO | GH2_N--GH2--GH2_C | glycohydrolase |
| 69 | 70 | 392 | NO | DUF1680--GH88 | glycohydrolase |
| 71 | 72 | 285 | YES | GH16--SKN1 | glycohydrolase |
| 73 | 74 | 844 | YES | GH92 | glycohydrolase |
| 75 | 76 | 537 | NO | GH43 | glycohydrolase |
| 77 | 78 | 898 | | GH47 | glycohydrolase |
| 79 | 80 | 418 | YES | GH18 | glycohydrolase |
| 81 | 82 | 327 | NO | GH43--GH43 | glycohydrolase |
| 83 | 84 | 269 | YES | GH16--SKN1 | glycohydrolase |
| 85 | 86 | 558 | YES | GH16 | glycohydrolase |
| 87 | 88 | 426 | YES | GH18 | glycohydrolase |
| 89 | 90 | 451 | YES | GH43 | glycohydrolase |
| 91 | 92 | 518 | NO | AMP-binding--GH3 | glycohydrolase |
| 93 | 94 | 533 | YES | GH72--GH2_C--X8 | glycohydrolase |
| 95 | 96 | 606 | | GH47 | glycohydrolase |
| 97 | 98 | 454 | YES | GH76 | glycohydrolase |
| 99 | 100 | 403 | NO | GH18 | glycohydrolase |
| 101 | 102 | 358 | NO | GH18 | glycohydrolase |
| 103 | 104 | 586 | | Metallophos | accessroy protein |
| 105 | 106 | 683 | NO | Lipase_3 | accessory protein |
| 107 | 108 | 320 | | NAD_binding_2--3HCDH_N--DAO-- | accessory protein |
| | | | | Saccharop_dh--ApbA--3HCDH | |
| 109 | 110 | 423 | NO | Cutinase--Abhydrolase_1 | accessory protein |
| 111 | 112 | 383 | NO | GDPD | accessory protein |
| 113 | 114 | 505 | NO | Thi4--HI0933_like--Pyr_redox_2--Pyr_redox- | accessory protein |
| | | | | FAD_binding_2--DAO--GIDA--Pyr_redox-- | |
| | | | | 3HCDH_N--Pyr_redox_dim | |
| 115 | 116 | 441 | YES | HI0933_like--FAD_binding_2--Pyr_redox_2-- | accessory protein |
| | | | | DAO--Pyr_redox--GIDA--FAD_binding_3 | |
| 117 | 118 | 376 | NO | COesterase--Abhydrolase_3 | accessory protein |
| 119 | 120 | 225 | YES | DOMON | accessory protein |
| 121 | 122 | 279 | YES | Peptidase_S9--Esterase_phd-- | accessory protein |
| | | | | Abhydrolase_2--AXE1 | |
| 123 | 124 | 263 | YES | Lipase_GDSL | accessory protein |
| 125 | 126 | 238 | NO | FSH1--Abhydrolase_2--Thioesterase | accessory protein |
| 127 | 128 | 828 | YES | DOMON--GMC_oxred_N--HI0933_like-- | accessory protein |
| | | | | FAD_binding_2--DAO--Pyr_redox_2-- | |
| | | | | GMC_oxred_C--CBM_1 | |
| 129 | 130 | 911 | NO | PDEase_I | accessory protein |
| 131 | 132 | 292 | NO | Esterase--Esterase_phd--Peptidase_S9 | accessory protein |
| 133 | 134 | 355 | | peroxidase | accessory protein |
| 135 | 136 | 515 | NO | esterase | accessory protein |
| 137 | 138 | 588 | | Abhydrolase_1--Esterase | accessory protein |
| 139 | 140 | 565 | NO | Peptidase_C65 | accessory protein |
| 141 | 142 | 677 | NO | PI-PLC-X--PI-PLC-Y | accessory protein |
| 143 | 144 | 244 | | Abhydrolase_2--FSH1--DLH--Peptidase_S9 | accessory protein |
| 145 | 146 | 576 | YES | COesterase--Abhydrolase_3 | accessory protein |
| 147 | 148 | 623 | YES | GMC_oxred_N--GMC_oxred_C | accessory protein |
| 149 | 150 | 188 | NO | 4HBT | accessory protein |
| 151 | 152 | 231 | YES | Cutinase--PE-PPE | accessory protein |
| 153 | 154 | 650 | YES | laccase-like Cu-oxidase_3--Cu-oxidase--Cu- | accessory protein |
| | | | | oxidase_2 | |
| 155 | 156 | 212 | NO | | accessory protein |
| 157 | 158 | 235 | YES | Lipase_GDSL | accessory protein |
| 159 | 160 | 303 | NO | DUF1989 | accessory protein |
| 161 | 162 | 573 | NO | Tyr-DNA_phospho | accessory protein |
| 163 | 164 | 424 | YES | Tyrosinase | accessory protein |
| 165 | 166 | 443 | NO | FAD_binding_3--DAO--SE | accessory protein |
| 167 | 168 | 348 | YES | CBM_1 | accessory protein |
| 169 | 170 | 291 | YES | Esterase_phd--Peptidase_S9-- | accessory protein |
| | | | | Abhydrolase_1 | |
| 171 | 172 | 408 | NO | Beta-lactamase | accessory protein |
| 173 | 174 | 1076 | YES | | accessory protein |
| 175 | 176 | 220 | YES | WSC--WSC | accessory protein |
| 177 | 178 | 401 | YES | Muc_lac_enz | accessory protein |

TABLE 2

| | | | minimum | | | |
|---|---|---|---|---|---|---|
| | | polypeptide | fragment | | | |
| nucleic acid | amino acid | length (no. | size (no. | signal | | |
| seq id no | seq id no | amino acids) | amino acids) | peptide | Pfam domains; function | Functional class |
| 179 | 180 | 270 | | NO | GH3 | glycohydrolase |
| 181 | 182 | 491 | 421 | NO | GH5 | glycohydrolase |
| 183 | 184 | 506 | 414 | NO | GH10--CBM_1 | glycohydrolase |
| 185 | 186 | 226 | 214 | YES | GH11 | glycohydrolase |
| 187 | 188 | 69 | | YES | GH7 | glycohydrolase |
| 189 | 190 | 373 | | YES | GH10 | glycohydrolase |
| 191 | 192 | 285 | 231 | NO | GH11 | glycohydrolase |
| 193 | 194 | 147 | | NO | GH11 | glycohydrolase |
| 195 | 196 | 370 | | YES | GH62--CBM_1 | glycohydrolase |
| 197 | 198 | 180 | | NO | GH3_C | glycohydrolase |
| 199 | 200 | 856 | 491 | NO | Aminotran_1_2--GH43--GH43 | glycohydrolase |
| 201 | 202 | 185 | | YES | GH30 | glycohydrolase |
| 203 | 204 | 652 | 629 | | GH15--CBM_20 | glycohydrolase |
| 205 | 206 | 673 | | YES | GH67N--GH67M--GH67C | glycohydrolase |
| 207 | 208 | 904 | 219 | NO | GH18--LysM | glycohydrolase |
| 209 | 210 | 819 | 522 | NO | Rad10--GH47 | glycohydrolase |
| 211 | 212 | 215 | | NO | GH71 | glycohydrolase |
| 213 | 214 | 484 | 472 | YES | GH30 | glycohydrolase |
| 215 | 216 | 493 | 476 | NO | GH76 | glycohydrolase |
| 217 | 218 | 614 | | YES | GH31 | glycohydrolase |
| 219 | 220 | 410 | 350 | YES | GH16--PAAR_motif | glycohydrolase |
| 221 | 222 | 900 | 873 | YES | GH2_N--GH2--GH2_C--Big_1 | glycohydrolase |
| 223 | 224 | 391 | 375 | YES | GH18 | glycohydrolase |
| 225 | 226 | 248 | 219 | YES | GH16 | glycohydrolase |
| 227 | 228 | 417 | 400 | YES | GH76 | glycohydrolase |
| 229 | 230 | 343 | | NO | GH31 | glycohydrolase |
| 231 | 232 | 616 | 372 | NO | GMC_oxred_N--GMC_oxred_C; alcohol oxidase | accessroy protein |
| 233 | 234 | 87 | | NO | Thi4 | accessory protein |
| 235 | 236 | 535 | | NO | DUF2424--Abhydrolase_3--Abhydrolase_3; esterase | accessory protein |
| 237 | 238 | 130 | | NO | esterase | accessory protein |
| 239 | 240 | 345 | | NO | Abhydrolase_2--Peptidase_S9--Abhydrolase_2; | accessory protein |
| | | | | | esterase | |
| 241 | 242 | 395 | | NO | esterase | accessory protein |
| 243 | 244 | 77 | | YES | esterase | accessory protein |
| 245 | 246 | 1155 | | NO | FAD_binding_2--Pyr_redox_2--GMC_oxred_N-- | accessory protein |
| | | | | | GMC_oxred_C | |
| 247 | 248 | 423 | 424 | YES | laccase-like_Cu-oxidase_2--Cu-oxidase_3 | accessory protein |
| 249 | 250 | 121 | 52 | NO | esterase | accessory protein |
| 251 | 252 | 137 | | NO | DUF676--PGAP1; esterase associate Pfam domain | accessory protein |
| 253 | 254 | 211 | | NO | Thi4--DAO--Pyr_redox_2--Lycopene_cycl-- | accessory protein |
| | | | | | FAD_binding_2 | |
| 255 | 256 | 425 | 346 | NO | Thi4--FAD_binding_3--HI0933_like--Lycopene_cycl-- | accessory protein |
| | | | | | DAO--Pyr_redox_2--FAD_binding_2 | |
| 257 | 258 | 337 | | NO | Hydrolase_4--Abhydrolase_1 | accessory protein |
| 259 | 260 | 1398 | 719 | NO | Cu_amine_oxidN2--Cu_amine_oxidN3-- | accessory protein |
| | | | | | Cu_amine_oxid--Cu_amine_oxid--Fungal_trans | |
| 261 | 262 | 645 | 624 | NO | PDEase_II--PDEase_II--PDEase_II | accessory protein |
| 263 | 264 | 271 | | NO | Lipase_GDSL | accessory protein |
| 265 | 266 | 387 | | NO | esterase | accessory protein |
| 267 | 268 | 260 | | YES | DUF2424--Abhydrolase_3--Peptidase_S9; esterase- | accessory protein |
| | | | | | lipase | |
| 269 | 270 | 103 | | YES | esterase-lipase | accessory protein |
| 271 | 272 | 805 | | YES | WSC--WSC--WSC--WSC--Glyoxal_oxid_N | accessory protein |
| 273 | 274 | 831 | 314 | NO | FMN_red--Flavodoxin_2--Flavodoxin_1--PUA-- | accessory protein |
| | | | | | PNP_UDP_1 | |
| 275 | 276 | 232 | 227 | YES | Lipase_GDSL | accessory protein |
| 277 | 278 | 483 | | NO | laccase-like Cu-oxidase_3--Cu-oxidase | accessory protein |
| 279 | 280 | 110 | | NO | laccase-like Cu-oxidase_2 | accessory protein |
| 281 | 282 | 54 | | | esterase | accessory protein |
| 283 | 284 | 644 | 615 | NO | Exo_endo_phos--zf-GRF | accessory protein |
| 285 | 286 | 392 | 336 | YES | Tyrosinase | accessory protein |
| 287 | 288 | 122 | | NO | Acyl-ACP_TE--4HBT | accessory protein |
| 289 | 290 | 303 | 85 | YES | | accessory protein |
| 291 | 292 | 709 | | YES | DOMON--Thi4--GMC_oxred_N--HI0933_like-- | accessory protein |
| | | | | | FAD_binding_2--DAO--Pyr_redox_2; alcohol oxidase | |
| | | | | | homolog | |
| 293 | 294 | 390 | 337 | YES | Tyrosinase | accessory protein |
| 295 | 296 | 498 | | NO | FAD_binding_3 | accessory protein |
| 297 | 298 | 332 | | YES | Palm_thioest | accessory protein |
| 299 | 300 | 641 | 363 | NO | Abhydrolase_2--LIP--Gln-synt_N--Gln-synt_C | accessory protein |
| 301 | 302 | 1210 | 1054 | NO | DUF676--BSP_II--DUF676 | accessory protein |
| 303 | 304 | 197 | | NO | esterase | accessory protein |
| 305 | 306 | 469 | | NO | Pyr_redox_2--DAO--GIDA--Pyr_redox-- | accessory protein |
| | | | | | Pyr_redox_dim | |
| 307 | 308 | 326 | 304 | YES | CBM_1 | accessory protein |
| 309 | 310 | 1543 | 928 | NO | GH3--GH3_C--NDT80_PhoG | glycohydrolase |
| 311 | 312 | 777 | | YES | GH3--GH3_C | glycohydrolase |
| 313 | 314 | 890 | | YES | GH3--GH3_C | glycohydrolase |
| 315 | 316 | 103 | | NO | GH3 | glycohydrolase |
| 317 | 318 | 968 | | NO | GH3--GH3_C | glycohydrolase |
| 319 | 320 | 827 | 810 | YES | GH3--GH3_C | glycohydrolase |
| 321 | 322 | 342 | 338 | YES | GH5 | glycohydrolase |
| 323 | 324 | 370 | | YES | GH5--GH2_C | glycohydrolase |
| 325 | 326 | 115 | | NO | GH10 | glycohydrolase |
| 327 | 328 | 64 | | NO | GH11 | glycohydrolase |
| 329 | 330 | 218 | | YES | GH11 | glycohydrolase |
| 331 | 332 | 83 | | YES | GH11 | glycohydrolase |
| 333 | 334 | 519 | | YES | GH7--CBM_1 | glycohydrolase |
| 335 | 336 | 867 | | NO | GH3--GH3_C | glycohydrolase |
| 337 | 338 | 398 | 327 | NO | GH10 | glycohydrolase |
| 339 | 340 | 381 | 359 | YES | GH6 | glycohydrolase |
| 341 | 342 | 1097 | 661 | YES | FAD_binding_3--Pyr_redox_2--GMC_oxred_N-- | glycohydrolase |
| | | | | | GMC_oxred_C--GH7 | |
| 343 | 344 | 395 | | YES | GH16 | glycohydrolase |
| 345 | 346 | 605 | 603 | YES | GH47 | glycohydrolase |
| 347 | 348 | 858 | 856 | NO | GH2_N--GH2--GH2_C | glycohydrolase |
| 349 | 350 | 304 | | YES | GH16 | glycohydrolase |
| 351 | 352 | 808 | 759 | NO | GH47 | glycohydrolase |
| 353 | 354 | 1080 | 1063 | NO | GH2_N--GH2--GH2_C--Bgal_small_N | glycohydrolase |
| 355 | 356 | 412 | | NO | GH20 | glycohydrolase |
| 357 | 358 | 416 | | NO | GH16 | glycohydrolase |
| 359 | 360 | 1113 | | NO | GH47 | glycohydrolase |
| 361 | 362 | 1084 | 1064 | NO | GH38--Alpha-mann_mid--GH38C | glycohydrolase |
| 363 | 364 | 374 | | NO | GH3_C--PA14 | glycohydrolase |
| 365 | 366 | 1468 | | YES | LysM--LysM--Chitin_bind_1--GH18 | glycohydrolase |
| 367 | 368 | 812 | | YES | GH92 | glycohydrolase |
| 369 | 370 | 648 | 577 | NO | GH47 | glycohydrolase |
| 371 | 372 | 812 | | YES | GH92 | glycohydrolase |
| 373 | 374 | 180 | | YES | GH43 | glycohydrolase |
| 375 | 376 | 387 | 360 | YES | GH16 | glycohydrolase |
| 377 | 378 | 320 | 292 | YES | GH43 | glycohydrolase |
| 379 | 380 | 611 | 587 | YES | GH43 | glycohydrolase |
| 381 | 382 | 542 | 490 | YES | GH43--GH43 | glycohydrolase |
| 383 | 384 | 475 | 364 | NO | GH76 | glycohydrolase |
| 385 | 386 | 397 | | YES | GH2_N--GH2 | glycohydrolase |
| 387 | 388 | 284 | | YES | GH43 | glycohydrolase |
| 389 | 390 | 638 | | NO | GH31--Raffinose_syn--Melibiase--Raffinose_syn | glycohydrolase |
| 391 | 392 | 810 | 787 | YES | GH81 | glycohydrolase |
| 393 | 394 | 456 | | YES | GH26--GH26 | glycohydrolase |
| 395 | 396 | 982 | 961 | YES | GH31 | glycohydrolase |
| 397 | 398 | 1134 | 791 | NO | LysM--Chitin_bind_1--GH18--DUF3142 | glycohydrolase |
| 399 | 400 | 435 | | YES | GH71 | glycohydrolase |
| 401 | 402 | 456 | | YES | GH76 | glycohydrolase |
| 403 | 404 | 534 | 522 | NO | GH18 | glycohydrolase |
| 405 | 406 | 393 | | YES | GH76--GH76 | glycohydrolase |
| 407 | 408 | 972 | | YES | GH31 | glycohydrolase |
| 409 | 410 | 870 | 764 | YES | GH2_N--GH2--GH2_C--GH2_C | glycohydrolase |
| 411 | 412 | 336 | | NO | GH43--GH43--AbfB | glycohydrolase |
| 413 | 414 | 386 | | NO | GH16 | glycohydrolase |
| 415 | 416 | 821 | 767 | NO | GH31 | glycohydrolase |
| 417 | 418 | 719 | 475 | YES | GH76 | glycohydrolase |
| 419 | 420 | 286 | 277 | YES | GH17 | glycohydrolase |
| 421 | 422 | 695 | 486 | NO | Zn_clus--GH16 | glycohydrolase |
| 423 | 424 | 416 | | YES | GH16 | glycohydrolase |
| 425 | 426 | 268 | | NO | GH2_N--GH2 | glycohydrolase |
| 427 | 428 | 629 | 590 | YES | GH71 | glycohydrolase |
| 429 | 430 | 850 | | NO | GH31 | glycohydrolase |
| 431 | 432 | 464 | | YES | GH76 | glycohydrolase |
| 433 | 434 | 838 | | YES | GH63--Trehalase | glycohydrolase |
| 435 | 436 | 423 | 402 | YES | GH28 | glycohydrolase |
| 437 | 438 | 1754 | 793 | NO | F-box--GH35--MFS_1--Sugar_tr | glycohydrolase |
| 439 | 440 | 878 | | YES | GH67N--GH67M--GH67C | glycohydrolase |
| 441 | 442 | 463 | 436 | YES | GH28 | glycohydrolase |
| 443 | 444 | 502 | 280 | NO | GH43 | glycohydrolase |
| 445 | 446 | 526 | 523 | YES | p450 | accessory protein |
| 447 | 448 | 213 | | YES | Cutinase--Abhydrolase_1 | accessory protein |
| 449 | 450 | 655 | 587 | YES | GMC_oxred_N--DAO--GMC_oxred_C | accessory protein |
| 451 | 452 | 578 | 525 | YES | Thi4--GMC_oxred_N--HI0933_like--DAO-- | accessory protein |
| | | | | | FAD_binding_2--Pyr_redox_2--FAD_binding_2--DAO-- | |
| | | | | | GMC_oxred_C | |
| 453 | 454 | 441 | 409 | YES | FAD_binding_3--HI0933_like--FAD_binding_2--DAO-- | accessory protein |
| | | | | | Pyr_redox_2--GIDA--Pyr_redox--FA_binding_3 | |
| 455 | 456 | 203 | 178 | YES | Cupin_5; oxidase domain | accessory protein |
| 457 | 458 | 173 | | YES | esterase | accessory protein |
| 459 | 460 | 251 | | YES | Peptidase_S9--Abhydrolase_1--Esterase_phd | accessory protein |
| 461 | 462 | 265 | | NO | Pex14_N--SR-25--4HBT | accessory protein |
| 463 | 464 | 602 | 506 | NO | FAD_binding_3--DAO | accessory protein |
| 465 | 466 | 283 | | NO | Thioesterase | accessory protein |
| 467 | 468 | 582 | 503 | NO | Erythro_esteras--Erythro_esteras | accessory protein |
| 469 | 470 | 437 | | YES | Lipase_GDSL | accessory protein |
| 471 | 472 | 533 | 508 | | p450 | accessory protein |
| 473 | 474 | 318 | 311 | | PGAP1--Thioesterase--Abhydrolase_1--Esterase | accessory protein |
| 475 | 476 | 670 | 582 | NO | DUF676--PGAP1--UPF0227 | accessory protein |
| 477 | 478 | 127 | | NO | Lipase_3 | accessory protein |
| 479 | 480 | 860 | | YES | peroxidase--WSC--WSC | accessory protein |
| 481 | 482 | 1128 | | NO | efhand_like--PI-PLC-X--PI-PLC-Y--C2--esterase | accessory protein |
| 483 | 484 | 132 | | NO | DUF2343 | accessory protein |
| 485 | 486 | 141 | | YES | esterase | accessory protein |
| 487 | 488 | 418 | | YES | HI0933_like--DAO--FAD_binding_2--Pyr_redox_2-- | accessory protein |
| | | | | | Lycopene_cycl--DAO--FAD_binding_3 | |
| 489 | 490 | 221 | | NO | esterase | accessory protein |
| 491 | 492 | 2275 | 2237 | NO | ketoacyl-synt--Thiolase_N--Ketoacyl-synt_C-- | accessory protein |
| | | | | | Acyl_transf_1--PP-binding--PP-binding--Thioesterase | |
| | | | | | laccase-like Cu-oxidase_3--Cu-oxidase--Cu- | |
| 493 | 494 | 1287 | 735 | NO | oxidase_2 | accessory protein |
| 495 | 496 | 529 | | NO | esterase | accessory protein |
| 497 | 498 | 193 | | YES | Lipase_GDSL | accessory protein |
| 499 | 500 | 432 | | NO | COesterase--Abhydrolase_3; esterase-lipase | accessory protein |
| 501 | 502 | 1338 | | NO | Acyl_transf_1--PP-binding--PP-binding--Thioesterase-- | accessory protein |
| | | | | | Abhydrolase_1 | |
| 503 | 504 | 273 | | NO | COesterase--Abhydrolase_3 | accessory protein |
| 505 | 506 | 559 | 448 | | COesterase | accessory protein |
| 507 | 508 | 405 | 371 | YES | Tyrosinase | accessory protein |
| 509 | 510 | 769 | 742 | NO | GMC_oxred_N--GMC_oxred_C | accessory protein |
| 511 | 512 | 397 | | YES | DUF463--esterase | accessory protein |
| 513 | 514 | 394 | 335 | YES | Abhydrolase_2--Abhydrolase_3--Abhydrolase_1; | accessory protein |
| | | | | | esterase | |
| 515 | 516 | 1444 | | NO | DUF676--PGAP1--NB-ARC; esterase | accessory protein |
| 517 | 518 | 709 | 708 | NO | Cu_amine_oxidN2--Cu_amine_oxid | accessory protein |
| 519 | 520 | 254 | 221 | NO | laccase-like Cu-oxidase_3--Cu-oxidase--Cu- | accessory protein |
| | | | | | oxidase_2 | |
| 521 | 522 | 321 | 192 | NO | GMC_oxred_C | accessory protein |
| 523 | 524 | 416 | 394 | YES | Tannase--Tannase--Tannase | accessory protein |
| 525 | 526 | 592 | | NO | GMC_oxred_N--DAO--FAD_binding_2--Pyr_redox_2-- | accessory protein |
| | | | | | Lycopene_cycl--GMC_oxred_C; alcohol oxidase | |
| 527 | 528 | 205 | | NO | FOLy_LDA1_HMM | accessory protein |
| 529 | 530 | 383 | 351 | YES | Tyrosinase | accessory protein |
| 531 | 532 | 203 | | NO | esterase | accessory protein |
| 533 | 534 | 279 | | YES | Cutinase--PE-PPE--Cutinase--CBM_1; esterase | accessory protein |
| 535 | 536 | 409 | 347 | YES | Cupin_1--Cupin_2--Cupin_1--Cupin_3--Cupin_2; | accessory protein |
| | | | | | aldehyde oxidase | |
| 537 | 538 | 112 | | YES | esterase | accessory protein |
| 539 | 540 | 594 | | YES | p450 | accessory protein |
| 541 | 542 | 530 | | NO | esterase | accessory protein |
| 543 | 544 | 186 | | YES | GMC_oxred_N--GMC_oxred_C | accessory protein |
| 545 | 546 | 234 | | NO | DUF1749-esterase | accessory protein |
| 547 | 548 | 647 | 621 | YES | GMC_oxred_N--DAO--Lycopene_cycl-- | accessory protein |
| | | | | | GMC_oxred_C; alcohol oxidase | |
| 549 | 550 | 591 | | | Metallophos; esterase | accessory protein |
| 551 | 552 | 417 | | | esterase | accessory protein |
| 553 | 554 | 247 | | NO | Beta-lactamase; esterase | accessory protein |
| 555 | 556 | 1114 | | NO | Lipase_3 | accessory protein |
| 557 | 558 | 426 | | NO | DUF1100--Esterase--UPF0227--Esterase_phd-- | accessory protein |
| | | | | | Peptidase_S9 | |
| 559 | 560 | 231 | 231 | NO | | accessory protein |
| 561 | 562 | 638 | | NO | GMC_oxred_N--GMC_oxred_C alcohol oxidase | accessory protein |
| | | | | | domain | |
| 563 | 564 | 169 | | NO | esterase | accessory protein |
| 565 | 566 | 639 | | YES | laccase-like Cu-oxidase_3--Cu-oxidase_2--Cu- | accessory protein |
| | | | | | oxidase--Cu-oxidase_2 | |
| 567 | 568 | 316 | 271 | YES | Pectinesterase--Pectinesterase | accessory protein |
| 569 | 570 | 285 | | NO | FSH1--Abhydrolase_2--FSH1 | accessory protein |
| 571 | 572 | 219 | | NO | Esterase | accessory protein |
| 573 | 574 | 243 | | | Abhydrolase_3--Peptidase_S9--AXE1 | accessory protein |
| 575 | 576 | 313 | | YES | Esterase--Esterase_phd--Peptidase_S9--COesterase | accessory protein |
| 577 | 578 | 91 | | NO | CBM_1 | accessory protein |
| 579 | 580 | 682 | 665 | YES | COesterase--Abhydrolase_3 | accessory protein |
| 581 | 582 | 404 | | NO | DUF676--PGAP1 esterase domain | accessory protein |
| 583 | 584 | 227 | | YES | | accessory protein |
| 585 | 586 | 480 | | NO | PI-PLC-X--SR-25--PI-PLC-Y | accessory protein |
| 587 | 588 | 662 | 575 | NO | Tyr-DNA_phospho | accessory protein |
| 589 | 590 | 639 | | YES | Lipase_3 | accessory protein |
| 591 | 592 | 154 | 154 | YES | COesterase | accessory protein |
| 593 | 594 | 556 | | YES | COesterase--COesterase | accessory protein |
| 595 | 596 | 427 | 421 | YES | Tyrosinase | accessory protein |
| 597 | 598 | 602 | 602 | NO | Thi4--FAD_binding_3--DAO--FAD_binding_2-- | accessory protein |
| | | | | | Phe_hydrox_dim | |
| 599 | 600 | 474 | | NO | peroxidase | accessory protein |
| 601 | 602 | 305 | | NO | esterase | accessory protein |
| 603 | 604 | 866 | 857 | NO | DUF726--Thioesterase--DUF605 esterase domain | accessory protien |
| 605 | 606 | 644 | | YES | Thi4--FAD_binding_3--FAD_binding_2--Pyr_redox_2-- | accessory protein |
| | | | | | GIDA--DAO--Succ_DH_flav_C | |
| 607 | 608 | 292 | | NO | Lipase_3 | accessory protein |
| 609 | 610 | 645 | | YES | Tyrosinase | accessory protein |
| 611 | 612 | 502 | | YES | Cupin_1--3-HAO--Cupin_2--Cupin_1--Cupin_2 | accessory protein |
| | | | | | oxidase domain | |
| 613 | 614 | 451 | 427 | NO | Beta-lactamase | accessory protein |
| 615 | 616 | 483 | 473 | NO | esterase | accessory protein |
| 617 | 618 | 419 | 348 | NO | GMC_oxred_C | accessroy protein |
| 619 | 620 | 386 | | YES | Tyrosinase--GMC_oxred_N--GMC_oxred_C | accessory protein |
| 621 | 622 | 506 | 481 | NO | AP_endonuc_2 | accessory protein |
| 623 | 624 | 301 | 288 | | 4HBT | accessory protein |
| 625 | 626 | 693 | 555 | NO | COesterase--Abhydrolase_3 esterase-lipase domain | accessroy protein |
| 627 | 628 | 470 | 445 | YES | Cupin_1--Cupin_2--AraC_binding--Cupin_3--Cupin_1-- | accessory protein |
| | | | | | Cupin_3--Cupin_2 oxidase domain | |
| 629 | 630 | 217 | 201 | YES | Cupin_1--Cupin_2 | accessory protein |
| 631 | 632 | 375 | 364 | YES | Tyrosinase | accessory protein |
| 633 | 634 | 367 | 364 | NO | Acyl_CoA_thio--Acyl_CoA_thio | acceossry protein |
| 635 | 636 | 759 | 743 | NO | Phosphodiest | accessory protein |
| 637 | 638 | 404 | | YES | Lipase_GDSL | accessory protein |
| 639 | 640 | 627 | | NO | Abhydro_lipase--Abhydrolase_1 | accessory protein |
| 641 | 642 | 616 | | YES | laccase-like Cu-oxidase_3--Cu-oxidase--Cu- | accessory protein |
| | | | | | oxidase_2 domain | |
| 643 | 644 | 660 | 532 | NO | p450--p450 | accessory protein |
| 645 | 646 | 208 | | NO | COesterase--Abhydrolase_3 esterase domain | accessory protein |
| 647 | 648 | 295 | | NO | DUF2424--Abhydrolase_3 | accessory protein |
| 649 | 650 | 649 | | YES | p450 | accessory protein |
| 651 | 652 | 591 | 141 | NO | Retrotrans_gag--COesterase--Abhydrolase_3 | accessory protein |
| | | | | | esterase domain | |
| 653 | 654 | 564 | | NO | GMC_oxred_N--DAO--Lycopene_cycl--GMC_oxred_C | accessory protein |
| | | | | | alcohol oxidase domains | |
| 655 | 656 | 437 | 422 | YES | Glycos_transf_1 | accessory protein |
| 657 | 658 | 483 | | NO | DUF2424--Abhydrolase_3 | accessory protein |
| 659 | 660 | 624 | 624 | YES | PhoD | accessory protein |
| 661 | 662 | 1243 | 1124 | NO | DUF676--CorA esterase domain | accessory protein |
| 663 | 664 | 362 | 344 | YES | peroxidase | accessory protein |
| 665 | 666 | 168 | 153 | NO | 4HBT | accessory protein |
| 667 | 668 | 241 | | NO | CPDase | accessory protein |
| 669 | 670 | 301 | | NO | DUF676--PGAP1--LACT--Abhydrolase_1 | accessory protein |
| 671 | 672 | 505 | 448 | NO | SPX--SPX | accessory protein |
| 673 | 674 | 763 | 517 | NO | COesterase--Abhydrolase_3--Coesterase; esterase- | accessory protein |
| | | | | | lipase | |
| 675 | 676 | 230 | | NO | Abhydrolase_3 | accessory protein |
| 677 | 678 | 500 | | YES | p450--p450 | accessory protein |
| 679 | 680 | 785 | 377 | NO | GDPD--SET | accessory protein |
| 681 | 682 | 524 | | NO | Thioesterase--Abhydrolase_1--DUF915--Esterase | accessory protein |
| 683 | 684 | 295 | 269 | YES | Lipase_GDSL | accessory protein |
| 685 | 686 | 793 | | NO | RNA_lig_T4_1--tRNA_lig_kinase--tRNA_lig_CPD | accessory protein |
| 687 | 688 | 1505 | | NO | cNMP_binding--cNMP_binding--Patatin | accessory protein |
| 689 | 690 | 169 | | YES | Metallophos | accessory protein |
| 691 | 692 | 299 | | NO | Abhydrolase_2--FSH1--Abhydrolase_3-- | accessory protein |
| | | | | | Abhydrolase_2 | |
| 693 | 694 | 236 | | YES | CHAP | accessory protein |
| 695 | 696 | 202 | | YES | Tyrosinase | accessory protein |
| 697 | 698 | 649 | | NO | FAD_binding_3--Pyr_redox--Phe_hydrox_dim | accessory protein |
| 699 | 700 | 239 | | YES | Esterase_phd | accessory protein |
| 701 | 702 | 1201 | 1163 | NO | SPX--SPX--Ank--Ank--GDPD | accessory protein |
| 703 | 704 | 718 | 697 | YES | COesterase--Abhydrolase_3; esterase lipase | accessory protein |
| 705 | 706 | 386 | | YES | Phosphoesterase | accessory protein |
| 707 | 708 | 111 | | NO | 4HBT | accessory protein |
| 709 | 710 | 380 | 374 | YES | Dioxygenase_C | accessory protein |
| 711 | 712 | 582 | | YES | WSC--WSC | accessory protein |
| 713 | 714 | 906 | 540 | YES | RhgB_N--Peptidase_M28--Peptidase_M20 | accessory protein |
| 715 | 716 | 336 | | YES | Dioxygenase_C | accessory protein |
| 717 | 718 | 225 | | YES | Tannase--Tannase | accessory protein |
| 719 | 720 | 66 | | NO | esterase | accessory protein |

The application's sequence listing, which the Patent Office published only in electronic form, follows.

SEQUENCE LISTING (720 sequences)

SEQ ID NO: 1 - DNA, 1365 bp, Myceliophthora thermophilia
  CDS (1)...(1365)
atgagatccgccgccttggtatccgtcttggcaaccgtcctcggcctgggggctgcgaagccgacgacgacggtgccagagccgcccagcaaacgggcgtcagtgccgactgtcacggtgtctggaaatgcgttctggcagggcgacacgcgcttctacgtccggggcattgactaccagccgggtggctcctcggcgatggccgatcccctggctgataccacggtctgcaagcgagacattgccgagttcaagaagttgggcgtcaacacaatccgcgtctacacggtcgacaactcggccaatcacgacgagtgcatgaaggagctggccgacgccggcatctacgtcgtcatcgacgccaacaacccgctctactcgctcaaccgcctcgacccggccccctcgtacaacaccaagtacctccagagcgtctttgccaccattgacgagttcatcaagtacgacaacacgctggccttcttctcgggcaacgaggtcatcaacgataatgtcaagagcacgcttgccgcccgctatgtcaaggctgtcactcgtgatatgcgctcctacatcaagagccgcggctaccgctccgttccggtgggctactcggcggcggacgtggcccagaaccgcatgcagcttgcacattacatgaactgcggcaccgaggacgagcggagcgacttcttcgcttttaacgactactcttggtgcaacaccaacttcgaagaggctggttgggaccagaaggtcaagaacttcaccggctacggcatcgccatctttctctccgaatatggctgtatcacaaacggccgcgactttggcgaggtcgcggccctcatgagcgacaagatgacgcccgtgtactcgggcggcctgatgtacgagtactcgctcgaggccaacggctacggtatcgtcaaaattgatagccccgacgccaccagcgtggaggagcagaaggagttttccaaattcgccaaggcgctgaaggagaaccccgcacccaagggcgacggcggcttcacgtcgaccacgcacgccgttgcctgcccgaccaaggatgccaactggttggtggacagcacgctcctgccggccattccggacgatgcgaagaagttcatgtctgaaggcgcgggccgcggccccgggctgaagggtgaggggtcgcagaatgcagccgaagggaccagcacgggcgatgccaccccaggctccggcaaggtgaccggcacgccgtcacacagcggcgattccgatgacgaatcgaacgcggcgagcgtggacgcgacgccgttcattcttacagggctggtggcggcgctgactctcgccggaactctgctcttgtaa

SEQ ID NO: 2 - protein, 454 aa, Myceliophthora thermophilia
MRSAALVSVLATVLGLGAAKPTTTVPEPPSKRASVPTVTVSGNAFWQGDTRFYVRGIDYQPGGSSAMADPLADTTVCKRDIAEFKKLGVNTIRVYTVDNSANHDECMKELADAGIYVVIDANNPLYSLNRLDPAPSYNTKYLQSVFATIDEFIKYDNTLAFFSGNEVINDNVKSTLAARYVKAVTRDMRSYIKSRGYRSVPVGYSAADVAQNRMQLAHYMNCGTEDERSDFFAFNDYSWCNTNFEEAGWDQKVKNFTGYGIAIFLSEYGCITNGRDFGEVAALMSDKMTPVYSGGLMYEYSLEANGYGIVKIDSPDATSVEEQKEFSKFAKALKENPAPKGDGGFTSTTHAVACPTKDANWLVDSTLLPAIPDDAKKFMSEGAGRGPGLKGEGSQNAAEGTSTGDATPGSGKVTGTPSHSGDSDDESNAASVDATPFILTGLVAALTLAGTLLL

SEQ ID NO: 3 - DNA, 1383 bp, Myceliophthora thermophilia
  CDS (1)...(1383)
atgaggactgcagcgctcttgtccgcggtcggggctgcgaccgctgtgcacggcaacccgacggcgaccgtcaggtcgaagccgcgcgctactgagctcgagcctatcacggtgacgggcaatgccttcttcaagggcaatgagaggttctacatccgcggcatcgactaccagcccggcggcgccgcagccaacgtcgaccctctggccgaccctgacatctgcctgaaggatatcgccaagttcaagaagctcggtgtcaacgtgattcgcgtctactcgaccgacaactcgctggaccacgacgagtgcatgaacgcgctcgccgacgccggcatctacgttgtgctcgacgccaacaacccgctgtactcgatcaaccgcgaggacccccacggctcgtacaacacgccctatctgcagagcgtgtttgccaccatcgatgcctttgccaagtactccaacaccatggccttcttctccggcaacgaggtcatccacgacctcctcaacaccacccgcaccgctccctacgtgaaggccaccgaccgtgacatgcgtcgttacatcaaggcccgcggctatcgcaagatccccgtcgggtactcggccgccgatgtgacgaccaaccggatgcagactgcccactacttcaactgcggctccgatgaggagcgcagcgacttcttcgcttttaacgactactcctggtgcagcaccgacttcgtcacgtctggctggaacaagaaggtcgaggacttcaagggctacggcatccccctgttcctgtccgagtacggctgcatcgacaacccgcgcgactttggcgagatcgagtcgctcatgcaccgcaacatgacgggcgtctactccggcggcctgctgtacgagtacagcatggagccgaacaactatggtatcgtcaagatcaagggcggccaggacaacggcggtgccgaccagacgggcgagcgcgaggagctgcccgaattctcggcctttgccgctgcgctcaagaagtggcccgctcccacggacgacggcggctacaccaagacctccaaggcttccgagtgcccgaccaaggacgcccactgggacgtcgagtcgtctgtgctcccggacactcccgagggtgccctcaagttctttgaggagggcgctggcaagggtcccggcctgaagggccccggctcccagtgggccgtcgaccaggcttcgaccagctcgggcggcaagagcagcagcggtacctccgaggacggcgagtctagcagctccagcgccgccattcgcggctctgttcccgccctggacaaggccccatttgtcatctctggtgttgtgcttctcttcactctggttggcgccgcggctttctaa

SEQ ID NO: 4 - protein, 460 aa, Myceliophthora thermophilia
MRTAALLSAVGAATAVHGNPTATVRSKPRATELEPITVTGNAFFKGNERFYIRGIDYQPGGAAANVDPLADPDICLKDIAKFKKLGVNVIRVYSTDNSLDHDECMNALADAGIYVVLDANNPLYSINREDPHGSYNTPYLQSVFATIDAFAKYSNTMAFFSGNEVIHDLLNTTRTAPYVKATDRDMRRYIKARGYRKIPVGYSAADVTTNRMQTAHYFNCGSDEERSDFFAFNDYSWCSTDFVTSGWNKKVEDFKGYGIPLFLSEYGCIDNPRDFGEIESLMHRNMTGVYSGGLLYEYSMEPNNYGIVKIKGGQDNGGADQTGEREELPEFSAFAAALKKWPAPTDDGGYTKTSKASECPTKDAHWDVESSVLPDTPEGALKFFEEGAGKGPGLKGPGSQWAVDQASTSSGGKSSSGTSEDGESSSSSAAIRGSVPALDKAPFVISGVVLLFTLVGAAAF

SEQ ID NO: 5 - DNA, 2295 bp, Myceliophthora thermophilia
  CDS (1)...(2295)
atgacaaacctccgtctcacgatcgaagacggcaagttccgcgacggctacggcaggcaagtccttctcagaggcatcaacgtcgccggcgaagccaagtaccccagcaagcccaaccagccgtcgcacgtgccagaagacttcttcgatggagacaatgtcagcttcgtcggccggcccttttccaaggaggaggctcatctccatttttcgcggttaaagcgctgcgggtacaacaccatccgctatgtcttcacttgggaggctatcgaagccgccggtccgggcatctacgatgaggcatggatagacgaaacaatagaggtgctgagggcggcaaaaagttacggtttctatgtcttcatggacccgcatcaggatgtgtggtctcgtttctcgggaggctcgggcgctcccatgtggacgctctacgcagctgggcttaacccccagagttttgcggcgacagaggccgccatcgtccataacacctacccagaacccgacgcgtttcccaagatgatctggtcgacaaactactaccgcctggccgcggccaccatgttcaccttattctttgccgggagagactttgcaccacggtgtatcatcgacggggtcaacattcaagattacttacagggtcacttcctccgcgcctgtgctcatctagcgcagcgcatccacgaggccggcgacatcgagaacgacgtggtgtttggctgggagagcttaaacgagccgaataaaggcatgataggctaccaagacatcagtgtcataccgaaagagcaggccctcaaaaaaggaacttgcccgacaatatggcagaccatgcttacggggtctgggagagcagtcgaggtcgagacctgggacatggggggacttggcccttacagggtggggcgcacgcttgttgatccgcatggcgaggttgcctggctcccagaaggctatgatgagtcgcggtacggctacaagagagatccagggtggaagctgggcgagtgcatctgggcacagcatggcgtctgggacccgtcgacggacacgcttctcagaaaggactattttgcgaagcatccggcaacgggggaaaccattgactattcctacttcaccaacacctactttatggattttttccgaaaataccgcgacacggtccggtcagtacacaagaacgccatcattcttctgcaaggtcccaccatggaacttccaccactcatcaaagacaccccggacggcgatgatccatttctagtctattcccctcactggtacgatggcatcaccttgatgaccaagaaatggaaccggaattggaacgtggacgtgataggcgtgctccgcgggcggtattggcacccagcccttgccgtgaagctgggggagacggcaatccggaactgcttccgagaccaacacgcggccatgagaaaggagggtctcgatcgcatggggaaccacccatgtttgatgacggaattcggcattccgtacgatatggatgacaagtacgcatacaagacgggcgactactcgagtcaatcggctgctatggacgccaatcatttcggagtggaggccgccggcttggaaggttacaccctttggctatacatggcctcaaacgatcacgaaaagggagatcagtggaatggcgaagatctctccatcgtctcggtcgatgataagctgctaccactctcggctcacccccgcatcccaagcctcgaagactcgacttcgaacctacgaacaccggctgctaggaaagagttggacgacgacgagagtgttacacccgctaacctcagacgctccatcacaaatccttccatttctttagaggctacctcgcgtcagcccgaactcacggcttccccgggctaccgtgcagcagaggcgtacgtgcggccagcgccggtcgctacggccggagtcataacggattatgggttcgatctccgaaaatgcctcttcacgttgacgatccaagctcccagagtggcagatccggaggcgccgacagtagtgttcctcccggagtaccatttccccaaggacgagtgctcggtcgaggtgagctcgggtaagtgggagataagcagcgatgaggaggagacggtgctcatccagcggctgcgctggtggcatggtgatgggcagcagaccttgagggtttccggggtcatcaagaagcacaacatcggagagagcgccgaggatacgggttattacgagcaatgtaaccagggggcatggagcagttgcacggccatgtaa

SEQ ID NO: 6 - protein, 764 aa, Myceliophthora thermophilia
MTNLRLTIEDGKFRDGYGRQVLLRGINVAGEAKYPSKPNQPSHVPEDFFDGDNVSFVGRPFSKEEAHLHFSRLKRCGYNTIRYVFTWEAIEAAGPGIYDEAWIDETIEVLRAAKSYGFYVFMDPHQDVWSRFSGGSGAPMWTLYAAGLNPQSFAATEAAIVHNTYPEPDAFPKMIWSTNYYRLAAATMFTLFFAGRDFAPRCIIDGVNIQDYLQGHFLRACAHLAQRIHEAGDIENDVVFGWESLNEPNKGMIGYQDISVIPKEQALKKGTCPTIWQTMLTGSGRAVEVETWDMGGLGPYRVGRTLVDPHGEVAWLPEGYDESRYGYKRDPGWKLGECIWAQHGVWDPSTDTLLRKDYFAKHPATGETIDYSYFTNTYFMDFFRKYRDTVRSVHKNAIILLQGPTMELPPLIKDTPDGDDPFLVYSPHWYDGITLMTKKWNRNWNVDVIGVLRGRYWHPALAVKLGETAIRNCFRDQHAAMRKEGLDRMGNHPCLMTEFGIPYDMDDKYAYKTGDYSSQSAAMDANHFGVEAAGLEGYTLWLYMASNDHEKGDQWNGEDLSIVSVDDKLLPLSAHPRIPSLEDSTSNLRTPAARKELDDDESVTPANLRRSITNPSISLEATSRQPELTASPGYRAAEAYVRPAPVATAGVITDYGFDLRKCLFTLTIQAPRVADPEAPTVVFLPEYHFPKDECSVEVSSGKWEISSDEEETVLIQRLRWWHGDGQQTLRVSGVIKKHNIGESAEDTGYYEQCNQGAWSSCTAM

SEQ ID NO: 7 - DNA, 1071 bp, Myceliophthora thermophilia
  CDS (1)...(1071)
atgaagtggacgagattgtctctcgctacggcctccctcttcggcctcgctgtcgccggatcaaagaacaagatccagatcggccaacaagtcatctactcgtaccccggcgaaacgccgccggagcacctcttcgatctcatcagggcaggccaagtgggcgggctcatcctcttcggcgagaacgtcaacgatgagctccccgcgaccatcgaacagttcctctcggcctaccgcgagagcccggcctacgccgacctcaagacgcccttcctgatcatgaccgaccaggagggcggccaggtccgccgtctgcccggcgcgcccgtggagtcggcgaaggaggtgggcgagtcggcggacccagtcgcggccgcgggccgggcgggcgccggcgcggcggagacgctgctccggtacaacatgaacgcgaacctcgcgcccgtcctggacgtctaccgggaggagggcgacttcacggacaattacgagcggtcgttcagcaacgacgcgacggtggtggccgggtgcgcggcgcagttcgtccgggaccagcagcgcgccaaggtcctcgcgacggcgaagcacttccccggcctgggcgccgccaagaaggacgagaacacggatgcgcgccccgtcaccatcgacctgacgctggaggagatccgcgcggtcgacgaggtcccctatcacgacgcgatcggcgccggcatcgccatgatcatgccgtcctgggccatctacccggcctttgacgccgagcggccggccgggctgagctcacgctggatacgagacgagctgcgcggaaggctgggcttcgacggcgtcattgtcaccgacgcgatcgaggccgggtccctgaaggcgtttggcgacgacgccgatcgggcgttgctggccaagaaggctggcgtggatctgattcttgcgtcggggaggaatgtgactcagggggagagcatcgtttctgcgttggccgccgcgctggagaatggagacctgtcgcagcaagagttggacgcgtcggacaagagggtacaggcggcccgggcgaagctcgcatag

SEQ ID NO: 8 - protein, 356 aa, Myceliophthora thermophilia
MKWTRLSLATASLFGLAVAGSKNKIQIGQQVIYSYPGETPPEHLFDLIRAGQVGGLILFGENVNDELPATIEQFLSAYRESPAYADLKTPFLIMTDQEGGQVRRLPGAPVESAKEVGESADPVAAAGRAGAGAAETLLRYNMNANLAPVLDVYREEGDFTDNYERSFSNDATVVAGCAAQFVRDQQRAKVLATAKHFPGLGAAKKDENTDARPVTIDLTLEEIRAVDEVPYHDAIGAGIAMIMPSWAIYPAFDAERPAGLSSRWIRDELRGRLGFDGVIVTDAIEAGSLKAFGDDADRALLAKKAGVDLILASGRNVTQGESIVSALAAALENGDLSQQELDASDKRVQAARAKLA

SEQ ID NO: 9 - DNA, 1431 bp, Myceliophthora thermophilia
  CDS (1)...(1431)
atgtctcttcccaaggacttcaagtggggcttcgccaccgcctcgtaccagattgagggctccgtcaacgaggatggccgtggcccctccatctgggacacattctgcgccatccccggcaagatcgccgacggcagctcgggtgccgtggcttgcgactcgtacaagcgcaccaaggaggacattgagctgctcaagtcgataggggccaaggcgtaccgcttctccatcgcgtggtcgcgcgtcatcccgctgggcggtcgcaacgaccccatcaaccagaagggtctggaccactacgtcaagttcgtcgacgacctcgtcgaggccggcatcgagcccttcatcaccctctcccactgggacctgccggacgcgctggagaagcgctacggcggctatctgaacaaggaggagttcgcggccgactttgagaactacgcgcgcgtcatgttcaaggccatccccaagtgcaagcactggatcaccttcaacgagccgtggtgcacgtccatcctgggctacaacacgggctacttcgcgcccggccgcacgtcggaccgcagcaagtcgcccgtcggcgacagcgcgcgcgagccgtggatcgtcggccacaacatcctcatcgcgcacgggagggccgtcaaggcgtaccgcgaggacttcaagcccacgcagggcggcgagatcggcatcacgctcaacggcgacgccacgctcccctgggacccggaggacccggccgacgtcgaggcgtgcgaccgcaagatcgagttcgccatctcgtggttcgccgaccccatctactttggcgagtacccggcgtcgatgcgcaagcagctgggcgaccgcctgcccaagttcacggccgaggaggtggcgctcgtcaagggctccaacgacttctacggcatgaaccactacacggccaactacatcaagcacaagaagggcgtgccgcccgaggacgacttcctgggcaacctcgagacgctcttctacaacaagaacgccgactgcatcgggcccgagacgcagtccttctggctgcgcccgcacccccagggcttccgcgacctgctcaactggctgagcaagcggtacggctaccccaagatctacgtgaccgagaacggcacgtcgctcaagggcgagaacgacatgccgctcgagcagatcctcgaggacgacttccgcgtcaagtactttcacgactacgtccacgccatggccaaggcctcggccgaggacggcgtcaacgtccagggctacctggcctggtcgctcatggataacttcgagtgggccgagggttacgagacccgcttcggcgtcacctacgtcgactacgccaacgaccagaagcgctaccccaagaagagcgcaaagagcctcaagccgctgtttgacagcctcatccggaaggagtaa

SEQ ID NO: 10 - protein, 476 aa, Myceliophthora thermophilia
MSLPKDFKWGFATASYQIEGSVNEDGRGPSIWDTFCAIPGKIADGSSGAVACDSYKRTKEDIELLKSIGAKAYRFSIAWSRVIPLGGRNDPINQKGLDHYVKFVDDLVEAGIEPFITLSHWDLPDALEKRYGGYLNKEEFAADFENYARVMFKAIPKCKHWITFNEPWCTSILGYNTGYFAPGRTSDRSKSPVGDSAREPWIVGHNILIAHGRAVKAYREDFKPTQGGEIGITLNGDATLPWDPEDPADVEACDRKIEFAISWFADPIYFGEYPASMRKQLGDRLPKFTAEEVALVKGSNDFYGMNHYTANYIKHKKGVPPEDDFLGNLETLFYNKNADCIGPETQSFWLRPHPQGFRDLLNWLSKRYGYPKIYVTENGTSLKGENDMPLEQILEDDFRVKYFHDYVHAMAKASAEDGVNVQGYLAWSLMDNFEWAEGYETRFGVTYVDYANDQKRYPKKSAKSLKPLFDSLIRKE

SEQ ID NO: 11 - DNA, 1233 bp, Myceliophthora thermophilia
  CDS (1)...(1233)
atgcgctgtttaacttcaaggcttcttgccgccagtctgctgatccttagtactgccacggcggcccctggtcgttccaatttcgtgacggtcgagggagggatcttcaagctctcgggcaaggactttcactttgctgggagcaacgcttactactttcccttcaatggcgaccagcaagatattgaaaaggggctaacagccgccaagcgagccgggctctctgtcttccgcacctgggggtttaacgagaagaacagcacatacaaccccgatggtttgccccagtatggcggagaaggcgctggtcctaccgaagtcgtgtttcagaggtggtaccctaacggcacttccatcattgacatcagcggcttcgacaaagtggtcaaggctgcagaaaagactggaatcaagctccttgtcgctctgaccaacaactgggccgattatggcggcatggacgtctatactgtcaatctgggcggcagataccacgacgatttctataccgtccccagaatcaaggaagccttcaagcgctatgtaaaggcggtcgtgactcggtacaaagattcgccgaccatctttgcttgggaactcgccaacgagccccgctgtggcgccgatggggtccgcaatcttccgcggagcgataactgcacgccccaggttctctcgtcttggatctcggagatgagcgcgtacatcaagagcctcgaccgcaaccatttggttacctggggaggcgagggaggcttcaaccgcgagtccgacgactgggcgtacaatggtgccgacggcggcgactttgaccatgagctctcgctcaagaccatcgactttggcgtcttccactcttatcctgactggtgggataagactgtcgagtggacgcaccagtggatccgtgatcatgctgccgccggtcggaaggctcgcaagcccgtcgtgcacgaagagtacggctggctgacgccggacaagaggctggagtacaccggcaaggtcgacaacaggacgagggtcgaggtactcggtggttggcaaaagacgactgtcagggaggagctggccgggagcatgtactggcagtacggatactcgaattattcctatggtcggaaccacgacgatggttttaccatctacttggacgacgaggaagccaagacgcttgtgtacgggcatgcgaaggaaatgaatgcccttaaccatcaccgtggtcggaagtag

SEQ ID NO: 12 - protein, 410 aa, Myceliophthora thermophilia
MRCLTSRLLAASLLILSTATAAPGRSNFVTVEGGIFKLSGKDFHFAGSNAYYFPFNGDQQDIEKGLTAAKRAGLSVFRTWGFNEKNSTYNPDGLPQYGGEGAGPTEVVFQRWYPNGTSIIDISGFDKVVKAAEKTGIKLLVALTNNWADYGGMDVYTVNLGGRYHDDFYTVPRIKEAFKRYVKAVVTRYKDSPTIFAWELANEPRCGADGVRNLPRSDNCTPQVLSSWISEMSAYIKSLDRNHLVTWGGEGGFNRESDDWAYNGADGGDFDHELSLKTIDFGVFHSYPDWWDKTVEWTHQWIRDHAAAGRKARKPVVHEEYGWLTPDKRLEYTGKVDNRTRVEVLGGWQKTTVREELAGSMYWQYGYSNYSYGRNHDDGFTIYLDDEEAKTLVYGHAKEMNALNHHRGRK

SEQ ID NO: 13 - DNA, 2283 bp, Myceliophthora thermophilia
  CDS (1)...(2283)
atggccttcctttcctcctttgcccttgccgccctcggggcactcgtcgtcccggcgaggggcggcgtgacgtacccggactgcgcaaacggaccgctcaagtcaaatacggtgtgcgatacgtcggcgtccccgggagcccgagccgctgctcttgtgagtgtaatgaacaacaacgaaaaacttgcaaatcttgtcaacaattcgcccggcgtctcgcggctcggcctgagtgcgtaccagtggtggaacgaagccctccacggagtagcccataaccgcggcattacctggggcggcgagttcagcgcggcaacccagttcccgcaggctatcacgacttccgccactttcgatgacgctttgatcgagcaaatcggcaccattatcagcaccgaggcccgtgcctttgccaacaatgggcgcgctcatctcgacttctggacgcccaacgtcaacccgtttcgagacccgcgatggggtcgcggacacgagacgccgggagaggatgcattcaagaataagaagtgggccgaggccttcgtcaagggcatgcaaggacccggaccgacgcaccgagtcatcgccacatgtaagcactacgccgcctacgacctcgagaactccgggagcacgacccgattcaacttcgatgcgaaggtgtcaactcaagatctcgccgagtactatctccctccgttccaacagtgcgcccgggactctaaggtgggctccatcatgtgcagctacaatgcggtcaatgaaatcccggcctgcgcgaatccttacctgatggataccatcctgcggaaacattggaattggaccgacgagcaccagtatattgtgagcgactgcgatgccgtgtactatctcggcaatgcgaacggcggccaccgatacaagccgagctatgcggcggcgatcggagcatctctcgaggctggttgcgataacatgtgctgggcgaccggcggcaccgccccggatcccgcctcagccttcaattccggccagttcagccagacgacactggacacggctattttgcgccagatgcagggcctcgtcctagcgggatactttgacggtccgggcggtatgtaccgcaacctgagcgtggcggacgtgaacacgcagaccgcccaggacactgcactcaaggcggcggaaggaggcatcgtgctcctcaagaacgatgggatccttccgctgtcggttaacggttccaatttccaggtcgctatgatcgggttctgggcgaacgcagccgacaagatgctcgggggttacagcgggagcccgccgttcaaccatgatcccgtgaccgctgcaagatcgatgggcatcacggtcaactacgtcaacgggccattgacgcaacccaacggggatacgtcggcagcactcaatgcggcccaaaagtccaacgcggtggtattctttggtggaatcgacaatacggtggagaaggagagtcaggacagaacgtccatcgagtggccctcagggcaactggctctgattcggaggctagccgaaaccggcaaaccagtcatcgtcgtcaggctcgggacgcacgtcgacgacaccccgctcctcagcattccgaatgtgagagccattttgtgggcaggatacccgggtcaagacggcgggactgctgtggtgaaaatcattaccggccttgctagtccggcggggaggctgcccgccactgtgtatccgtcttcgtacaccagccaagcgccctttacaaacatggccctgaggccttcttcgtcctatcccgggcgaacataccgctggtacagtaacgccgtctttccatttggccacggcctacattataccaatttcagtgtctcggtgcgggactttccggccagcttcgcgattgccgatctcctggcttcctgcggggattccgtggcgtatcttgatctttgccccttcccgtccgtgtcgctcaatgtgaccaatacaggcacccgcgtgtccgattacgttgcgcttgggttcttgtcgggagattttggtcccagcccacatcccatcaagacattggcgacgtataagcgcgtgtttaacatcgaacctggggaaacacaggtggccgagctagactggaagctggagagcctggtccgggtagatgagaagggcaacagggtactctaccccggaacatatacgcttcttgtggatcagccaaccttggcaaatatcacctttattttgacaggagaagaggcagtgttggatagttggccgcagccgtga

SEQ ID NO: 14 - protein, 760 aa, Myceliophthora thermophilia
MAFLSSFALAALGALVVPARGGVTYPDCANGPLKSNTVCDTSASPGARAAALVSVMNNNEKLANLVNNSPGVSRLGLSAYQWWNEALHGVAHNRGITWGGEFSAATQFPQAITTSATFDDALIEQIGTIISTEARAFANNGRAHLDFWTPNVNPFRDPRWGRGHETPGEDAFKNKKWAEAFVKGMQGPGPTHRVIATCKHYAAYDLENSGSTTRFNFDAKVSTQDLAEYYLPPFQQCARDSKVGSIMCSYNAVNEIPACANPYLMDTILRKHWNWTDEHQYIVSDCDAVYYLGNANGGHRYKPSYAAAIGASLEAGCDNMCWATGGTAPDPASAFNSGQFSQTTLDTAILRQMQGLVLAGYFDGPGGMYRNLSVADVNTQTAQDTALKAAEGGIVLLKNDGILPLSVNGSNFQVAMIGFWANAADKMLGGYSGSPPFNHDPVTAARSMGITVNYVNGPLTQPNGDTSAALNAAQKSNAVVFFGGIDNTVEKESQDRTSIEWPSGQLALIRRLAETGKPVIVVRLGTHVDDTPLLSIPNVRAILWAGYPGQDGGTAVVKIITGLASPAGRLPATVYPSSYTSQAPFTNMALRPSSSYPGRTYRWYSNAVFPFGHGLHYTNFSVSVRDFPASFAIADLLASCGDSVAYLDLCPFPSVSLNVTNTGTRVSDYVALGFLSGDFGPSPHPIKTLATYKRVFNIEPGETQVAELDWKLESLVRVDEKGNRVLYPGTYTLLVDQPTLANITFILTGEEAVLDSWPQP

SEQ ID NO: 15 - DNA, 1371 bp, Myceliophthora thermophilia
  CDS (1)...(1371)
atgtaccggcaggtcgcgaccgctctctccttcaccagcctcgtgctcggccagcaagcgggaaccctcaccgaggagatccacccctcgcttcccatcgaggtgtgcacagctcccggctcgtgcactaaggaggacaccaccgtggtcctggacgccaactggcgctggacacacgtcaccgacggctacaccaactgctacacgggcaacgcctggaacgagacggcctgccccgacggcgtgacgtgcgcggccaactgcgccatcgacggcgccgactacgagggcacgtacggtatcacgacgccgtccgatggcgcactcaagctcaactttgtcaccaagaaccagaacggccagaacgtcggctcgcgcgtctacctgatgaagggtgacgacaagtaccgcctcttcaacctgctcaacaaggagttcacctttgacgttgacgtgtccaacctgccctgcggcctgaacggcgctgtctatttcagcgagatggacgaggacggcggcatgtcccgcttcgagggcaacaaggccggcgccaagtacggcaccggctactgcgacagccagtgcccgcaggacatcaagtttatcaacggcgaggccaacaccgagggctggggcggcactgacggaaactccggcaccggcaagtacggcacctgctgcgccgagatggacatctgggaggccaactcagacgccaccgcctacactccgcacccgtgcaaggttaacgagcagacccggtgcgagagtgaggaggagtgcggtgcgggagacaaccggtacgccggcctgtgcgacaaggatggctgcgacttcaacagcttccgcctgggaaacaaggagttctacggcccaggcatgacggtcgacacgagcaagcccttcacggtggtaacgcagttcatcactgacgacaacaccgacacgggcgccctcaaggagatccgccgcttctacgtgcaggacggcaccgtgatccccaactcgcagaccgtcatcgaaggcgtcgaccccaccaactccatcacggacgagttttgcgagcagcagaagacggcctttggcgacaccaactacttcaagacggtcggtggcctgtccgccatgggcaagtcgctcgagaagatggtgctcgtcctcagcgtttgggatgatcatgccgccgccatgaactggctggacagcaactaccccaccgatggcgacccgtccaagcccggtgttgcccgtggccgttgcgacgccgaggccgggctgcccgagaatgtcgaggccgagcaccccgacgcctcggtcacttactccaacatcaagatcggcgccatcaactcgaccttcaccgccgcttag

SEQ ID NO: 16 - protein, 456 aa, Myceliophthora thermophilia
MYRQVATALSFTSLVLGQQAGTLTEEIHPSLPIEVCTAPGSCTKEDTTVVLDANWRWTHVTDGYTNCYTGNAWNETACPDGVTCAANCAIDGADYEGTYGITTPSDGALKLNFVTKNQNGQNVGSRVYLMKGDDKYRLFNLLNKEFTFDVDVSNLPCGLNGAVYFSEMDEDGGMSRFEGNKAGAKYGTGYCDSQCPQDIKFINGEANTEGWGGTDGNSGTGKYGTCCAEMDIWEANSDATAYTPHPCKVNEQTRCESEEECGAGDNRYAGLCDKDGCDFNSFRLGNKEFYGPGMTVDTSKPFTVVTQFITDDNTDTGALKEIRRFYVQDGTVIPNSQTVIEGVDPTNSITDEFCEQQKTAFGDTNYFKTVGGLSAMGKSLEKMVLVLSVWDDHAAAMNWLDSNYPTDGDPSKPGVARGRCDAEAGLPENVEAEHPDASVTYSNIKIGAINSTFTAA

SEQ ID NO: 17 - DNA, 387 bp, Myceliophthora thermophilia
  CDS (1)...(387)
atgcaccccaacattctcacactcgtcgccaccgttttcgtgggcaaggccgccgcccagcaggtcggtacctacaccaccgaaacgcaccccaggatgacctggcaaaggtgcagctccgggggctcctgcacgagcgtaaagggagagttggtcatcgactccaactggcgctgggtgcacgacaagaatggctacaccaactgctatacggccaacgagtggaactcgaccatctgcgccgacaaccagtcgtgcgcggccaactgtgccctcgacggcgccgactactcggggacgtacggcgcgaccaccagcgggaacgccctgacccttaaatttgtgaccaaggggtcttacagcaccaacatctgctctagatcttag

SEQ ID NO: 18 - protein, 128 aa, Myceliophthora thermophilia
MHPNILTLVATVFVGKAAAQQVGTYTTETHPRMTWQRCSSGGSCTSVKGELVIDSNWRWVHDKNGYTNCYTANEWNSTICADNQSCAANCALDGADYSGTYGATTSGNALTLKFVTKGSYSTNICSRS

SEQ ID NO: 19 - DNA, 1395 bp, Myceliophthora thermophilia
  CDS (1)...(1395)
atggggcagaagactctccaggggctggtggcggcggcggcactggcagcctcggtggcgaacgcgcagcaaccgggcaccttcacgcccgaggtgcatccgacgctgccgacgtggaagtgcacgacgagcggcgggtgcgtccagcaggacacgtcggtggtgctcgactggaactaccgctggttccacaccgaggacggtagcaagtcgtgcatcacctctagcggcgtcgaccggaccctgtgcccggacgaggcgacgtgcgccaagaactgcttcgtcgagggcgtcaactacacgagcagcggggtcgagacgtccggcagctccctcaccctccgccagttcttcaagggctccgacggcgccatcaacagcgtctccccgcgcgtctacctgctcgggggagacggcaactatgtcgtgctcaagctcctcggccaggagctgagcttcgacgtggacgtatcgtcgctcccgtgcggcgagaacgcggccctgtacctgtccgagatggacgcgacgggaggacggaacgagtacaacacgggcggggccgagtacgggtcgggctactgtgacgcccagtgccccgtgcagaactggaacaacgggacgctcaacacgggccgggtgggctcgtgctgcaacgagatggacatcctcgaggccaactccaaggccgaggccttcacgccgcacccctgcatcggcaactcgtgcgacaagagcgggtgcggcttcaacgcgtacgcgcgcggttaccacaactactgggcccccggcggcacgctcgacacgtcccggcctttcaccatgatcacccgcttcgtcaccgacgacggcaccacctcgggcaagctcgcccgcatcgagcgcgtctacgtccaggacggcaagaaggtgcccagcgcggcgcccgggggggacgtcatcacggccgacgggtgcacctccgcgcagccctacggcggcctttccggcatgggcgacgccctcggccgcggcatggtcctggccctgagcatctggaacgacgcgtccgggtacatgaactggctcgacgccggcagcaacggcccctgcagcgacaccgagggtaacccgtccaacatcctggccaaccacccggacgcccacgtcgtgctctccaacatccgctggggcgacatcggctccaccgtcgacaccggcgatggcgacaacaacggcggcggccccaacccgtcatccaccaccaccgctaccgctaccaccacctcctccggcccggccgagcctacccagacccactacggccagtgtggagggaaaggatggacgggccctacccgctgcgagacgccctacacctgcaagtaccagaacgactggtactcgcagtgcctgtag

SEQ ID NO: 20 - protein, 464 aa, Myceliophthora thermophilia
MGQKTLQGLVAAAALAASVANAQQPGTFTPEVHPTLPTWKCTTSGGCVQQDTSVVLDWNYRWFHTEDGSKSCITSSGVDRTLCPDEATCAKNCFVEGVNYTSSGVETSGSSLTLRQFFKGSDGAINSVSPRVYLLGGDGNYVVLKLLGQELSFDVDVSSLPCGENAALYLSEMDATGGRNEYNTGGAEYGSGYCDAQCPVQNWNNGTLNTGRVGSCCNEMDILEANSKAEAFTPHPCIGNSCDKSGCGFNAYARGYHNYWAPGGTLDTSRPFTMITRFVTDDGTTSGKLARIERVYVQDGKKVPSAAPGGDVITADGCTSAQPYGGLSGMGDALGRGMVLALSIWNDASGYMNWLDAGSNGPCSDTEGNPSNILANHPDAHVVLSNIRWGDIGSTVDTGDGDNNGGGPNPSSTTTATATTTSSGPAEPTQTHYGQCGGKGWTGPTRCETPYTCKYQNDWYSQCL

SEQ ID NO: 21 - DNA, 669 bp, Myceliophthora thermophilia
  CDS (1)...(669)
atggtcaagctctctctcatcgcagcgagccttgtggcacctagcgtgcttgcgggtcctctcatcggccccaagacgcaaaccgagagccagctgaacccgcgtcaaggcggctacaactacttccagaattggtccgagggaggcagcaatatccgctgcaacaacggccctgggggttcctacacggccgactggaacagcaggggcggcttcgtctgtggcaagggctggagctatggaggcaatcgcgccatcacgtacaccggcgaatacaacgccagcggccccggctacctcgccgtctacgggtggacccgcaacccgctgattgaatactacatcatcgaggcccatgccgacctcgcccccaacgagccgtggacatccaagggtaatttcagcttcgaggagggcgagtacgaggtcttcaccagcacccgcgtcaacaagccgtccatcgagggcaccaggacttttcagcagtactggtcgctgcgcaaggagcagcgggtcggcggcaccgtcaccacccagaggcactttgaagagtgggccaagctgggcatgaagctgggcaatcatgactatgtcatcctggcgaccgaaggatacactgccaacggaggatccggtagcagcgggcactcgagcattactctgcagtag

SEQ ID NO: 22 - protein, 222 aa, Myceliophthora thermophilia
MVKLSLIAASLVAPSVLAGPLIGPKTQTESQLNPRQGGYNYFQNWSEGGSNIRCNNGPGGSYTADWNSRGGFVCGKGWSYGGNRAITYTGEYNASGPGYLAVYGWTRNPLIEYYIIEAHADLAPNEPWTSKGNFSFEEGEYEVFTSTRVNKPSIEGTRTFQQYWSLRKEQRVGGTVTTQRHFEEWAKLGMKLGNHDYVILATEGYTANGGSGSSGHSSITLQ

SEQ ID NO: 23 - DNA, 981 bp, Myceliophthora thermophilia
  CDS (1)...(981)
atgaaggccaatctcctggtcctcgcgccgctggccgtctcggcagcgcccgcgctcgagcaccgccaggcaactgagagcatcgacgcgctcattaaggccaagggcaagctctactttggcacctgtaccgaccagggccggctgacgtcgggcaagaacgcggacatcatcagggccaacttcggccaggtgacgcccgagaacagcatgaagtggcagagcatcgagccatcgcggggtcagttcacctggggccaggctgactacctcgtcgactgggccactcagaacaacaagaccatccgcggccacacgctcgtctggcactcgcagctcgccggctacgttcagcagatcggcgaccggaacaccttgacccagaccatccaggaccacattgccgccgtcatgggccgctacaagggcaagatctacgcctgggatgtcatcaacgagatgttcaacgaggatggctcgcttcgcagcagcgtcttctccaacgtcctcggagaggactttgttgggatcgccttcaaggcggcgcgcgaggccgaccccgacaccaagttgtacatcaacgactacaacctcgacagccccaactacgccaagctgaccaacggcatggtcgctcacgtcaagaagtggctcgcggccggcatccccatcgacggcatcggcacccagggtcacctgcagtctggccagggttccggtcttgcgcaggccatcaaggctctcgcccaggctggcgtcgaggaggttgccgtcaccgagctcgatatccagaaccagaacaccaacgactacactgccgttgtccagggctgcttggacgagcccaagtgcgtcggtatcaccgtctggggtgtccgcgatcccgactcgtggcgtccccagggcaaccccttgctcttcgacagcaacttcaaccccaaggcgaactacaatgccatcgtccagctcctcaagcagtag

SEQ ID NO: 24 - protein, 326 aa, Myceliophthora thermophilia
MKANLLVLAPLAVSAAPALEHRQATESIDALIKAKGKLYFGTCTDQGRLTSGKNADIIRANFGQVTPENSMKWQSIEPSRGQFTWGQADYLVDWATQNNKTIRGHTLVWHSQLAGYVQQIGDRNTLTQTIQDHIAAVMGRYKGKIYAWDVINEMFNEDGSLRSSVFSNVLGEDFVGIAFKAAREADPDTKLYINDYNLDSPNYAKLTNGMVAHVKKWLAAGIPIDGIGTQGHLQSGQGSGLAQAIKALAQAGVEEVAVTELDIQNQNTNDYTAVVQGCLDEPKCVGITVWGVRDPDSWRPQGNPLLFDSNFNPKANYNAIVQLLKQ

SEQ ID NO: 25 - DNA, 1188 bp, Myceliophthora thermophilia
  CDS (1)...(1188)
atgaagttcgtgcagtccgccaccctggcgttcgccgccacggccctcgctgcgccctcgcgcacgactccccagaagccccgccaggcctcggcgggctgcgcgtcggccgtgacgctcgatgccagcaccaacgtgttccagcagtacacgctgcaccccaacaacttctaccgtgccgaggtcgaggctgccgccgaggccatctccgactcggcgctggccgagaaggcccgcaaggtcgccgacgtcggtaccttcctgtggctcgacaccatcgagaacattggccggctggagcccgcgctcgaggacgtgccctgcgagaacatcgtgggtctcgtcatctacgacctcccgggccgtgactgcgcggccaaggcctccaacggcgagctcaaggtcggcgagctcgacaggtacaagaccgagtacatcgacaagatcgccgagatcctcaaggcccactccaacacggccttcgccctcgtcatcgagcccgactcgctccccaacctggtcaccaatagcgacctgcagacgtgccagcagagcgcttccggctaccgcgagggtgtcgcctatgccctcaagcagctcaacctccccaacgtggtcatgtacatcgatgccggccacggtggctggctcggctgggacgccaacctcaagcccggcgcccaggagctcgccagcgtctacaagtctgctggttcgccctcgcaagtccgcggtatctccaccaacgtggctggttggaacgcctgggaccaggagcccggtgagttctcggacgcctcggatgcccagtacaacaagtgccagaacgagaagatctacatcaacacctttggcgctgagctcaagtctgccggcatgcccaaccacgccatcatcgacactggccgcaacggtgtcaccggtctccgcgacgagtggggtgactggtgcaacgtcaacggcgccggcttcggtgtgcgcccgactgccaacactggcgacgagctcgccgacgccttcgtgtgggtcaagcccggtggcgagtccgacggcaccagcgactcgtcggcggcgcgctacgacagcttctgcggcaagcccgacgccttcaagcccagccccgaggccggtacctggaaccaggcctacttcgagatgctcctcaagaacgccaacccgtccttctaa

SEQ ID NO: 26 - protein, 395 aa, Myceliophthora thermophilia
MKFVQSATLAFAATALAAPSRTTPQKPRQASAGCASAVTLDASTNVFQQYTLHPNNFYRAEVEAAAEAISDSALAEKARKVADVGTFLWLDTIENIGRLEPALEDVPCENIVGLVIYDLPGRDCAAKASNGELKVGELDRYKTEYIDKIAEILKAHSNTAFALVIEPDSLPNLVTNSDLQTCQQSASGYREGVAYALKQLNLPNVVMYIDAGHGGWLGWDANLKPGAQELASVYKSAGSPSQVRGISTNVAGWNAWDQEPGEFSDASDAQYNKCQNEKIYINTFGAELKSAGMPNHAIIDTGRNGVTGLRDEWGDWCNVNGAGFGVRPTANTGDELADAFVWVKPGGESDGTSDSSAARYDSFCGKPDAFKPSPEAGTWNQAYFEMLLKNANPSF

SEQ ID NO: 27 - DNA, 678 bp, Myceliophthora thermophilia
  CDS (1)...(678)
atgcatctctccgccaccaccgggttcctcgccctcccggccctggccctggcccagctctcgggcagcggccagacgacccggtactgggactgctgcaagccgagctgcgcctggcccggcaagggcccctcgtctccggtgcaggcctgcgacaagaacgacaacccgctcaacgacggcggctccacccggtccggctgcgacgcgggcggcagcgcctacatgtgctcctcccagagcccctgggccgtcagcgacgagctgtcgtacggctgggcggccgtcaagctcgccggcagctccgagtcgcagtggtgctgcgcctgctacgagctgaccttcaccagcgggccggtcgcgggcaagaagatgattgtgcaggcgaccaacaccggtggcgacctgggcgacaaccactttgacctggccatccccggtggcggtgtcggtattttcaacgcctgcaccgaccagtacggcgctcccccgaacggctggggcgaccgctacggcggcatccattccaaggaagagtgcgaatccttcccggaggccctcaagcccggctgcaactggcgcttcgactggttccaaaacgccgacaacccgtcggtcaccttccaggaggtggcctgcccgtcggagctcacgtccaagagcggctgctcccgttaa

SEQ ID NO: 28 - protein, 225 aa, Myceliophthora thermophilia
MHLSATTGFLALPALALAQLSGSGQTTRYWDCCKPSCAWPGKGPSSPVQACDKNDNPLNDGGSTRSGCDAGGSAYMCSSQSPWAVSDELSYGWAAVKLAGSSESQWCCACYELTFTSGPVAGKKMIVQATNTGGDLGDNHFDLAIPGGGVGIFNACTDQYGAPPNGWGDRYGGIHSKEECESFPEALKPGCNWRFDWFQNADNPSVTFQEVACPSELTSKSGCSR

SEQ ID NO: 29 - DNA, 1449 bp, Myceliophthora thermophilia
  CDS (1)...(1449)
atggccaagaagcttttcatcaccgccgcgcttgcggctgccgtgttggcggcccccgtcattgaggagcgccagaactgcggcgctgtgtggactcaatgcggcggtaacgggtggcaaggtcccacatgctgcgcctcgggctcgacctgcgttgcgcagaacgagtggtactctcagtgcctgcccaacagccaggtgacgagttccaccactccgtcgtcgacttccacctcgcagcgcagcaccagcacctccagcagcaccaccaggagcggcagctcctcctcctcctccaccacgcccccgcccgtctccagccccgtgaccagcattcccggcggtgcgacctccacggcgagctactctggcaaccccttctcgggcgtccggctcttcgccaacgactactacaggtccgaggtccacaatctcgccattcctagcatgactggtactctggcggccaaggcttccgccgtcgccgaagtccctagcttccagtggctcgaccggaacgtcaccatcgacaccctgatggtccagactctgtcccaggtccgggctctcaataaggccggtgccaatcctccctatgctgcccaactcgtcgtctacgacctccccgaccgtgactgtgccgccgctgcgtccaacggcgagttttcgattgcaaacggcggcgccgccaactacaggagctacatcgacgctatccgcaagcacatcattgagtactcggacatccggatcatcctggttatcgagcccgactcgatggccaacatggtgaccaacatgaacgtggccaagtgcagcaacgccgcgtcgacgtaccacgagttgaccgtgtacgcgctcaagcagctgaacctgcccaacgtcgccatgtatctcgacgccggccacgccggctggctcggctggcccgccaacatccagcccgccgccgagctgtttgccggcatctacaatgatgccggcaagccggctgccgtccgcggcctggccactaacgtcgccaactacaacgcctggagcatcgcttcggccccgtcgtacacgtcgcctaaccctaactacgacgagaagcactacatcgaggccttcagcccgctcttgaactcggccggcttccccgcacgcttcattgtcgacactggccgcaacggcaaacaacctaccggccaacaacagtggggtgactggtgcaatgtcaagggcaccggctttggcgtgcgcccgacggccaacacgggccacgagctggtcgatgcctttgtctgggtcaagcccggcggcgagtccgacggcacaagcgacaccagcgccgcccgctacgactaccactgcggcctgtccgatgccctgcagcctgcccccgaggctggacagtggttccaggcctacttcgagcagctgctcaccaacgccaacccgcccttctaa

SEQ ID NO: 30 - protein, 482 aa, Myceliophthora thermophilia
MAKKLFITAALAAAVLAAPVIEERQNCGAVWTQCGGNGWQGPTCCASGSTCVAQNEWYSQCLPNSQVTSSTTPSSTSTSQRSTSTSSSTTRSGSSSSSSTTPPPVSSPVTSIPGGATSTASYSGNPFSGVRLFANDYYRSEVHNLAIPSMTGTLAAKASAVAEVPSFQWLDRNVTIDTLMVQTLSQVRALNKAGANPPYAAQLVVYDLPDRDCAAAASNGEFSIANGGAANYRSYIDAIRKHIIEYSDIRIILVIEPDSMANMVTNMNVAKCSNAASTYHELTVYALKQLNLPNVAMYLDAGHAGWLGWPANIQPAAELFAGIYNDAGKPAAVRGLATNVANYNAWSIASAPSYTSPNPNYDEKHYIEAFSPLLNSAGFPARFIVDTGRNGKQPTGQQQWGDWCNVKGTGFGVRPTANTGHELVDAFVWVKPGGESDGTSDTSAARYDYHCGLSDALQPAPEAGQWFQAYFEQLLTNANPPF

SEQ ID NO: 31 - DNA, 837 bp, Myceliophthora thermophilia
  CDS (1)...(837)
atggttgctctctcttctctcctcgtcgctgcctctgcggcggccgtggccgtggctgcgccgagcgaggccctccagaagcgccagacgctcacgagcagccagacgggcttccacgacggcttttactactccttctggaccgacggtgccggcaacgtccggtacacgaacgaggccggcggccggtacagtgtcacctggtccggcaacaacggcaactgggttggcggcaagggctggaacccgggggctgctcgcaacatcagcttcacggggcagtataaccccaacggcaactcgtacctggccgtgtacgggtggacgcgcaacccgctgatcgagtactacatcgtcgagaacttcggcacgtacgacccgtcgacgggggcgcagcggctcggcagcatcacggtggacgggtcgacgtacaacatcctcaagacgacgcgggtcaaccagccgtccatcgagggcaccagcacctttgaccagttctggtccgtccggaccaacaagcgcagcagcggctccgtcaacgtcaaggctcacttcgacgcttgggcccaggccggcctccgcctgggcacccacgactaccagatcatggccaccgagggctacttctcgagcggctccgccaccatcaccgtcggcgagggcaccagcagcggcggcggcggcgacaatggcggcggcaacaacggcggcggcggcaacaccggcacctgcagcgccctgtacggccagtgcggtggccaggggtggacgggcccgacttgctgctcccagggaacctgccgcgtctccaaccagtggtactcgcagtgcttgtaa

SEQ ID NO: 32 - protein, 278 aa, Myceliophthora thermophilia
MVALSSLLVAASAAAVAVAAPSEALQKRQTLTSSQTGFHDGFYYSFWTDGAGNVRYTNEAGGRYSVTWSGNNGNWVGGKGWNPGAARNISFTGQYNPNGNSYLAVYGWTRNPLIEYYIVENFGTYDPSTGAQRLGSITVDGSTYNILKTTRVNQPSIEGTSTFDQFWSVRTNKRSSGSVNVKAHFDAWAQAGLRLGTHDYQIMATEGYFSSGSATITVGEGTSSGGGGDNGGGNNGGGGNTGTCSALYGQCGGQGWTGPTCCSQGTCRVSNQWYSQCL

SEQ ID NO: 33 - DNA, 966 bp, Myceliophthora thermophilia
  CDS (1)...(966)
atgaggccaacacgccccggtatcgtgctcctcgccaccgcgacctcggttgccggacagtcatgcgagctcccctcctcgtaccgctggacatcaaccggcgcgctggcacagccgaaaagcccgtgggtgtcgctcaaggacttcaccgtcgtcccgtacgacggccagcacctggtctacgcaacgacaaacgacgggaccaactggggctccatgggcttcagcctcttcagcgactgggatgccatgggctcggcgacgcagacgggcatgagctccagcgcggtggcgcccaccctgttctacttcgagcccaagaacgtttggatcctcgcccaccagtggggcccgacggccttctcgtaccggacgtccaacgattccaccaaccccaacagctggtcccagccccagcccctcttcaccggcaccatctcgggctcgagcaccggccccatcgaccagaccctcatcggcgacgaccagaatatgtacctcttcttctgcggcgacaacggcaagatctaccgcgccagcatgcccatcggcaacttccccggaaactttggcagcgagtcgaccgtcgtcatgagcgacagcaccaacaacctcttcgaggccgtccaggtgtacaaggtgaacgggaggcagcagtacctcatgctcgtcgaggccatcggcgcccagggccgctacttccgctccttcacggccacgaggctcgacggcgagtggacgcccaacgcggtcagcgaggctagtcccttcgccggcaaggccaactcgggcgccagctggaccaacgacatcagccacggcgagctcgtccgcctcagcgccgaccagaccttccccatcgacccctgcaacctgcagctgctctaccagggccgcgaccccagctcgggaggcgattacaaccgcctgccctaccgccccggcgtccttaccctgcagcgctga

SEQ ID NO: 34 - protein, 321 aa, Myceliophthora thermophilia
MRPTRPGIVLLATATSVAGQSCELPSSYRWTSTGALAQPKSPWVSLKDFTVVPYDGQHLVYATTNDGTNWGSMGFSLFSDWDAMGSATQTGMSSSAVAPTLFYFEPKNVWILAHQWGPTAFSYRTSNDSTNPNSWSQPQPLFTGTISGSSTGPIDQTLIGDDQNMYLFFCGDNGKIYRASMPIGNFPGNFGSESTVVMSDSTNNLFEAVQVYKVNGRQQYLMLVEAIGAQGRYFRSFTATRLDGEWTPNAVSEASPFAGKANSGASWTNDISHGELVRLSADQTFPIDPCNLQLLYQGRDPSSGGDYNRLPYRPGVLTLQR

SEQ ID NO: 35 - DNA, 687 bp, Myceliophthora thermophilia
  CDS (1)...(687)
atggtctcgctcaagtccctcctcctcgccgcggcggcgacgttgacggcggtgacggcgcgcccgttcgactttgacgacggcaactcgaccgaggcgctggccaagcgccaggtcacgcccaacgcgcagggctaccactcgggctacttctactcgtggtggtccgacggcggcggccaggccaccttcaccctgctcgagggcagccactaccaggtcaactggaggaacacgggcaactttgtcggtggcaagggctggaacccgggtaccggccggaccatcaactacggcggctcgttcaacccgagcggcaacggctacctggccgtctacggctggacgcacaacccgctgatcgagtactacgtggtcgagtcgtacgggacctacaacccgggcagccaggcccagtacaagggcagcttccagagcgacggcggcacctacaacatctacgtctcgacccgctacaacgcgccctcgatcgagggcacccgcaccttccagcagtactggtccatccgcacctccaagcgcgtcggcggctccgtcaccatgcagaaccacttcaacgcctgggcccagcacggcatgcccctcggctcccacgactaccagatcgtcgccaccgagggctaccagagcagcggctcctccgacatctacgtccagactcactag

SEQ ID NO: 36 - protein, 228 aa, Myceliophthora thermophilia
MVSLKSLLLAAAATLTAVTARPFDFDDGNSTEALAKRQVTPNAQGYHSGYFYSWWSDGGGQATFTLLEGSHYQVNWRNTGNFVGGKGWNPGTGRTINYGGSFNPSGNGYLAVYGWTHNPLIEYYVVESYGTYNPGSQAQYKGSFQSDGGTYNIYVSTRYNAPSIEGTRTFQQYWSIRTSKRVGGSVTMQNHFNAWAQHGMPLGSHDYQIVATEGYQSSGSSDIYVQTH

SEQ ID NO: 37 - DNA, 2202 bp, Myceliophthora thermophilia
  CDS (1)...(2202)
atgacccttcaagcctttgcgctgctggcggcggcggcccttgtacggggcgagaccccgaccaaggtccctcgcgacgctccgagaggagctgctgcttgggaagctgcccactcctcagcagccgctgccttgggaaagctgtcccagcaggacaagatcaacatcgtgacgggcgtcggctggaacaaggggccctgcgtgggcaatactcccgctatcagctccatcaactacccgcagctctgcctccaagacggacccctgggcgtccgcttcggttccagcatcaccgctttcactccaggcattcaggccgcgtcgacgtgggatgtggacctgatccgacaacgaggcgagtacatgggcgccgagttcaaggggtgtggcatccacgtccagctaggccccgtggccgggcccttgggtaaggttccgcaaggcggccgcaactgggagggctttggcgtggatccctacctcaccggcattgccatggccgagaccatcgaggggatacagtcagcgggcgtgcaagccaccgccaagcattacatcctcaacgagcaggagctcaaccgcgagaccatgagcagcaatgtcgacgaccgcaccttgcacgagctgtacctctggccttttgcagacgctgttcactctaacgtggccagcgtcatgtgcagttacaacaagatcaacggcacgtgggcgtgcgagaacgaccgggtgctgaacgtcattctgaagcaggagcttgggtttccgggctatgtgatgagcgactggaacgcgcagcactcgaccgacgacgcggccaaccacggcatggacatgacgatgcccggcagcgacttcaacggagggacgatcctctggggcccgcagctcgacagcgccgtcaacagcggccgggtgcccaagtcccgcctcgacgacatggtcgagcgcatcctcgcggcgtggtaccttctcggtcaggacagcaattacccggctatcaacatcggcgccaacgtacagggcaaccacaaggagaacgtgcgggcggtcgcgcgcgatggcatcgtgctcctcaagaacgacgacggcatcctcccgctcaagaagcccgccaagctcgccctcatcggttcggccgccgtcgtcaacccgcagggactgaactcctgccaggatcagggctgcaacaaaggcgcgctgggcatgggatgggggtccggggcggtcaactacccgtactttgtcgcgccgtacgacgcgctcaaggcccgcgcccaagaggacgggacgacggtcagcctgcacaactcggacagcacgagcggggtggcgaacgtggcctcggacgcggacgcggccatcgtggtcatcacggccgactcgggcgagggttacatcacagtcgaaggcgccgccggggaccggctgaacctcgacccgtggcacaacggcaacgagctggtaaaggcggtggcggcggccaacaagaacaccatcgtcgtcgtgcacagcgtcgggcccatcatcctcgagaccatcctggcaaccgaaggggtcaaggcgattgtgtgggccggcctgccaagccaggagaatggtaacgcgctggtggacatcctgtacggtctggcctcgccgtcgggcaagctggtctacaccatcgccaagcgagaacaggactacggcactgcggtcgttcgcggagacgacacatttccggagggcctgtttgtcgactaccggcactttgacaaggagaacatcgagccgcggtacgagtttgggtttgggctgtcatacaccaacttcacgtacgccgacctcgaactcacctcgaccgccacggccggcccagcgacgggcgagaccatccccggcggcgcggccgacctctgggaggaggtggccacggtcacggcgaccatcaccaacagcggcggcgtggacggcgccgaggtggcccagctgtacctgacgttgccgtcgtcggcgccggcgaccccgcccaagcagctccgcggcttcgccaagctcaagctggcggccggcgccagcgggaccgcgacgtttagtctgcgcaggcgcgacctcagctactgggacaccggccgcgggcagtgggtggtgccggagggcgagtttggcgtctcggtcggggcgagctcgcgcgatatccggctgacggggagcttccgagtatga

SEQ ID NO: 38 - protein, 733 aa, Myceliophthora thermophilia
MTLQAFALLAAAALVRGETPTKVPRDAPRGAAAWEAAHSSAAAALGKLSQQDKINIVTGVGWNKGPCVGNTPAISSINYPQLCLQDGPLGVRFGSSITAFTPGIQAASTWDVDLIRQRGEYMGAEFKGCGIHVQLGPVAGPLGKVPQGGRNWEGFGVDPYLTGIAMAETIEGIQSAGVQATAKHYILNEQELNRETMSSNVDDRTLHELYLWPFADAVHSNVASVMCSYNKINGTWACENDRVLNVILKQELGFPGYVMSDWNAQHSTDDAANHGMDMTMPGSDFNGGTILWGPQLDSAVNSGRVPKSRLDDMVERILAAWYLLGQDSNYPAINIGANVQGNHKENVRAVARDGIVLLKNDDGILPLKKPAKLALIGSAAVVNPQGLNSCQDQGCNKGALGMGWGSGAVNYPYFVAPYDALKARAQEDGTTVSLHNSDSTSGVANVASDADAAIVVITADSGEGYITVEGAAGDRLNLDPWHNGNELVKAVAAANKNTIVVVHSVGPIILETILATEGVKAIVWAGLPSQENGNALVDILYGLASPSGKLVYTIAKREQDYGTAVVRGDDTFPEGLFVDYRHFDKENIEPRYEFGFGLSYTNFTYADLELTSTATAGPATGETIPGGAADLWEEVATVTATITNSGGVDGAEVAQLYLTLPSSAPATPPKQLRGFAKLKLAAGASGTATFSLRRRDLSYWDTGRGQWVVPEGEFGVSVGASSRDIRLTGSFRV

SEQ ID NO: 39 - DNA, 744 bp, Myceliophthora thermophilia
  CDS (1)...(744)
atgcagccgtttctgctcttgttcctctcgtcggtcacggcggcgagccccctgacggcgctcgacaagcggcagcaggcgacgttgtgcgagcagtacggctactggtcgggcaacggttacgaggtcaacaacaacaactggggcaaggattcggcctcgggcggccatcagtgcacctacgtcgacagcagcagctccagcggcgtcgcctggcacacgacctggcagtgggaaggaggccagaaccaggtcaagagcttcgccaactgcggcctgcaggtgcccaagggcaggaccatctcgtccatcagcaacctgcagacctccatctcgtggtcctacagcaacaccaacatccgcgccaacgtggcctacgacctcttcaccgcggcagacccgaaccacgcgaccagcagcggcgactacgagctcatgatctggctggcgagattcggcgacgtctaccccatcggctcgtcccagggccacgtcaacgtggccggccaggactgggagctgtggacgggcttcaacggcaacatgcgggtctacagcttcgtagcgcccagcccccgcaacagcttcagcgccaacgtcaaggacttcttcaactatctccagtccaaccagggcttcccggccagcagccaataccttctcatcttccaggcgggcaccgagcccttcaccggcggcgagaccacccttaccgtcaacaactactctgcaagggttgcttaa

SEQ ID NO: 40 - protein, 247 aa, Myceliophthora thermophilia
MQPFLLLFLSSVTAASPLTALDKRQQATLCEQYGYWSGNGYEVNNNNWGKDSASGGHQCTYVDSSSSSGVAWHTTWQWEGGQNQVKSFANCGLQVPKGRTISSISNLQTSISWSYSNTNIRANVAYDLFTAADPNHATSSGDYELMIWLARFGDVYPIGSSQGHVNVAGQDWELWTGFNGNMRVYSFVAPSPRNSFSANVKDFFNYLQSNQGFPASSQYLLIFQAGTEPFTGGETTLTVNNYSARVA

SEQ ID NO: 41 - DNA, 2043 bp, Myceliophthora thermophilia
  CDS (1)...(2043)
atggcagcgcaattctcgactcaaaacgagagtcacatgcggaagcagggcggtggttacctgccaatcgaaaactatggcttgataggtaacatgagaacctgtgctatggtgggcatggacggcagcgtcgacttcatgtgttggcctgagttcgactcaccaacagtcttctgccgtctcctggataaggataagggaggctacttcagcatccagccggcttcccatctcagctgcaccacgaagcaacagtatttgccatcatctaatatcctgcagacccgctacatccacgaggatggcgtggttgaccttgtcgacttcttcccccggccgaagaacgccaaggttatcttcaagggccccaagcagggcgcctaccgcgagatgacgagcgtccaggaggagctgaagcagtggctagtccgtcgcgtcgagtgcgtccgcggccgtctccagctggacgttgagatcttccctgcatttggttatgcgaccgagccgcacaccaccactatcctgcaggaggagggtgtcccgcactgcaaccagagcaagacggcggcgttccacagcgagagcaccaagctacagctcgatgtcatcatcgaccatggagaggacggcgacgatagctggcccatcgtccgtttcaggaaagtcttgaagcccggcatgctcggcgagggcgtcgtcgcctgtatcgacatcagcgagggacaggccgtgtctttcgtcatacggaacgacgtggagaagcacgtcacggaaaacatcacaagcgccgtgctcgacacgcagcagcacgacactcaaacgtactggtacaactggatctccacgagcaagtacaagggccgctggcgtgaggtggtgtcacgcagcctcatgatcctgaagctcatgacgtacgagccgacgggggccatcattgcagccccgaccttctctatccccgaagctatcgggggcgtccgggcaagcaactgggactaccgcttctcgtgggttcgcgacgcgagcttcaccatctacatcctgctgcgcctgggcttcaccgaggaggcggacgcctacatgggcttcatcagcgagcgtttcctcaagtcgcgcgtagccgacggcgggctgcccatcatgttcaccatccgcggcgagaccgacatccccgagcgcgagctgacgcacttggacgggtaccggggcagcagaccggtgcgcatcggaaacggggccgccttccaccagcaattcgacatctacggcgagcttatggacgccatctacctgtacaacaagtacggcaagccgatccactgggatctgtggtgcacggtccgagagatgctcgactacgtgctcaccatcatgcaccagcccgacatgtccatctgggaggtgcgcaacaacaagcagaacttcacctactccaaggtcatgctctgggtggccttcgaccgcggcctgcgcctgtcggaaaagcgcaacttcccgtgccccaacagggtcaagtggctcgccgctcgggactcgctgtacgaggagatcatggagaaaggctacaacaaggagatgaagtgcttcgtgcagagctacgagaacaataccatgctcgactcgtccatcctgatcgccccgctcgtcttcttcatcgcccccaacgacccgaggttcctcaacaccatggatcgcatcatgctgcccccggagaagggcgggctgaccagcaccggcctggtgtaccggtacaacacggaggtgtccgaagatggtgttggcggccacgagggcgcgttcagcatgtgcacgttctggctggtcgaagccatgacgcgggcgtcggtctacgaatccaagtacctcgtgcgcgccatcaacctgtttgagaacatgctcagcttctccaaccatctgatgatgttctccgaggagatctcgcggagcggcgagcagctgggcaacacgccgcaggccttcagccacctggccctcatcagtgcggcctttaatctggaccgcgtctcggagcccaagaagtag

SEQ ID NO: 42 - protein, 680 aa, Myceliophthora thermophilia
MAAQFSTQNESHMRKQGGGYLPIENYGLIGNMRTCAMVGMDGSVDFMCWPEFDSPTVFCRLLDKDKGGYFSIQPASHLSCTTKQQYLPSSNILQTRYIHEDGVVDLVDFFPRPKNAKVIFKGPKQGAYREMTSVQEELKQWLVRRVECVRGRLQLDVEIFPAFGYATEPHTTTILQEEGVPHCNQSKTAAFHSESTKLQLDVIIDHGEDGDDSWPIVRFRKVLKPGMLGEGVVACIDISEGQAVSFVIRNDVEKHVTENITSAVLDTQQHDTQTYWYNWISTSKYKGRWREVVSRSLMILKLMTYEPTGAIIAAPTFSIPEAIGGVRASNWDYRFSWVRDASFTIYILLRLGFTEEADAYMGFISERFLKSRVADGGLPIMFTIRGETDIPERELTHLDGYRGSRPVRIGNGAAFHQQFDIYGELMDAIYLYNKYGKPIHWDLWCTVREMLDYVLTIMHQPDMSIWEVRNNKQNFTYSKVMLWVAFDRGLRLSEKRNFPCPNRVKWLAARDSLYEEIMEKGYNKEMKCFVQSYENNTMLDSSILIAPLVFFIAPNDPRFLNTMDRIMLPPEKGGLTSTGLVYRYNTEVSEDGVGGHEGAFSMCTFWLVEAMTRASVYESKYLVRAINLFENMLSFSNHLMMFSEEISRSGEQLGNTPQAFSHLALISAAFNLDRVSEPKK

SEQ ID NO: 43 - DNA, 678 bp, Myceliophthora thermophilia
  CDS (1)...(678)
atgaagtctgccctcgtcgcgaccatcgccgccttcgcggccggcgtgcaagccgccgtccaaggcttcgacatttcccactaccagcccagcgtggacttcgccgcggcctacaaatcgggtgcccgcttcgtcatcattaaggcgaccgagggcacgtcgtacatcgatcccaagttctcgtcgcactacacgggcgcgaccaaggccggcttcatccggggcgcgtaccactttgcgcacccgggccagtcgtcgggcgaggcgcaggccgactacttcctcgcgcacggcggtgggtggacgagcgacggcatcacgctgccgggtatgctggacctcgaggcctacaacgcaggccagtgctggggcctgtcgacgagcgccatggtcgcgtggatcaaggcgttcagcgaccgctaccactcgcgcaccggcgtctacccgctgctctacaccaacccgtcctggtggaaggcctgcaccggcaactccaacgccttcgtcaacaccaacccgctcgtcctcgctcgctacgccagctcgcccggcgagatccccggcggctggccgtaccagaccatctggcagaactcggactcgtacgcctacggcggcgactcggacatcttcaacggcgacctcgacggtctcaagaggctggcgaagggtccatga

SEQ ID NO: 44 - protein, 225 aa, Myceliophthora thermophilia
MKSALVATIAAFAAGVQAAVQGFDISHYQPSVDFAAAYKSGARFVIIKATEGTSYIDPKFSSHYTGATKAGFIRGAYHFAHPGQSSGEAQADYFLAHGGGWTSDGITLPGMLDLEAYNAGQCWGLSTSAMVAWIKAFSDRYHSRTGVYPLLYTNPSWWKACTGNSNAFVNTNPLVLARYASSPGEIPGGWPYQTIWQNSDSYAYGGDSDIFNGDLDGLKRLAKGP

SEQ ID NO: 45 - DNA, 1218 bp, Myceliophthora thermophilia
  CDS (1)...(1218)
atgcgtcccacatcagccctcgtcgcggccggcgttctcgtctcgggcacgtcggctgagaactacctcggcttcaactcgggagccaccctcgcggaccggtccgccaagttcaaggcggactggcttgccgaattcaagacggcgcagaacctggagaatgccccgggcaagttcaacgccgtgcgtctctataccaacatccaggcctactcggaggacaccccgatcgaggcgtttgaggccgccatcgagaccaacactaagattctgctgggtatctggacctcgggcaccaatagcattgagaaggaactcagcgcgctgaagaaggccatcgacaagtatggtagcaagtttaccgacctcgtcatcggcatgtcgattggtagcgaggacctctaccgcgattccgagacgggcgtcaagaacgaggccggtatcggtgcgggcccggacactctgatcaagttcatcaacgattacaagaaggcggtcgccggcacggcgctcaagggcgtccccattggccacgtcgacacatgggatgcttggacgaacggtaccaacaaggccgtgatcgacgctgtcgactggatcggcgtggacgagtacccctactacgagaacggcaagggtaacaacatcaagaactcgggcaccctctttgaccgtgccttcaatgcggttaagggcgttgccggcgacaagcccatctgggtcaccgagaccggctggccttcctcgggccccaactgggatcaggcggtctccagcgtcgagaacgccaagtactactgggacgaggtcggctgccgcaagctcttcaacaaggtgcccaccttctggtacaacctgcgcgactcgaaccccgacaacaagatgaagttcgccatcaccaacaacctctcgaccaagcccctgttcgacctgacctgccctaccaagtttgacaccccgacgtccacttccacgagcgccgcgccctcctcgactggcgtcagtgcccccagcagctctgccacgagtgcttccggctctactaacactactggcggtagcggcaccagcgccggcgctgacaacagtgctgctgagtctggtgacggaacggaggaggcggacgcgatcccgaccggaagcggcgcctccatcggcaggagcctcttcactgttgtcagcctggctctcgttgctggcgtcttcaccctgttctaa

SEQ ID NO: 46 - protein, 405 aa, Myceliophthora thermophilia
MRPTSALVAAGVLVSGTSAENYLGFNSGATLADRSAKFKADWLAEFKTAQNLENAPGKFNAVRLYTNIQAYSEDTPIEAFEAAIETNTKILLGIWTSGTNSIEKELSALKKAIDKYGSKFTDLVIGMSIGSEDLYRDSETGVKNEAGIGAGPDTLIKFINDYKKAVAGTALKGVPIGHVDTWDAWTNGTNKAVIDAVDWIGVDEYPYYENGKGNNIKNSGTLFDRAFNAVKGVAGDKPIWVTETGWPSSGPNWDQAVSSVENAKYYWDEVGCRKLFNKVPTFWYNLRDSNPDNKMKFAITNNLSTKPLFDLTCPTKFDTPTSTSTSAAPSSTGVSAPSSSATSASGSTNTTGGSGTSAGADNSAAESGDGTEEADAIPTGSGASIGRSLFTVVSLALVAGVFTLF

SEQ ID NO: 47 - DNA, 1887 bp, Myceliophthora thermophilia
  CDS (1)...(1887)
atgctgctcacctggaccgtggtcgtagctctggccatggccgtccgcgctatgtcgccccggtcataccctccatcgctgctaagggatgggctcagcacgagagcggggggcccttcgattcctgatgacattgtcttccgagacatgtggatggcgctcagcgatttgcaggagacgtactttgagcgctggctcgggacctggcctgacggaatcgactggacccgcgccgtaatgggcacgcatgtggccgctacactgcggaccatctcggacgagctgcggctcagcgagcccacccaggacgccgggtgcgtcaccaggaaggaagacgttgtcggcgggtattttgccgacgtgatcgcctactactttgccgaagacacctttgccatccgaaatcaggcctacgacgacatgctctgggtcgttttggcttggctggagtccatccggttcatcgacgagcacagcagggttgttgcctccgggtcgtcgtgctccacagagtcgggagcctggcccggtgccgaaacgtggtatggcagtcgctggatacccgccttcgcccaccgcgcgaggatattctgggagctggcggccaagggatgggacacgaagctctgcggaggcggcatgatttggaatccgcgcctgatgccgtacaagaacgccatcacgaaccaactcttcatatcggcctccattagcatgtatctccactttcccggcgatactaactcatctcctttctccgccggcgtcggttcggccctcgccggcggtgtcggtaccgccgactggccgccccacgaccccatctacggcaaggccgcccgggatgcccacgactggcttgcttcgtccaacatgaccaacgcgcaaggcctctacgcggacggcttccacgtctcgggccagagcaccggcagcaacaacacgcgctgtgacgaccgcgacgagatggtctacacctacaaccagggcgtcctcctgtcgggactgatgggcctgtaccgggccaccggtcaagaacgctacctccgcgagggccacaccctgattcggaacgtcatctccgccaccgggtacgatctcgagcaggacaagccggtcgacccgatccacccggatcgtgtccctccctggcgcggcctcggccgcgtgggcgtcctagaggaagcatgcgacgcgtcggggacgtgctcccaggacgcgcagaccttcaagggcatctggatgcatcactttgccgcgttctgcgcgccggccgcgctgcggttcacaggctcggactctctcggctctcaacggcctcagcctcacggggaggcaggggcaggggcgggggccgggactatccgggcgcggcacgagcgcgaatgtaggaggtacatcccgtggctgcgccacaacgtgcgcgccgcgacgggcacgagggacgaaaacggcctgtttggcatgtggtggaccgccgggctgctgacgctcacgagcggcgaggccatcgaggcggccggggacctgcacccgctcccgccggggggggacgggggggaggtggtggattaccggaacacgggagtgccgctggatcctaagtggactcgtgcggccggggatgggtggtcgccggcagtgccggtgccggatgcgaaaaggaccggtcaggcaccgctcggtcacggtcagggtgttgttgttggtggtggttcgggttcgggggaagttaagagagccggatcggagaagagggcggaggctttggaggagagcggtgcttatgatcccaatcttcgcgggcgagggaggacggtggaaacgcagggcggcggactggccgtcctcagggcgttgtgggtggtttctagactcgagggatag

SEQ ID NO: 48 - protein, 628 aa, Myceliophthora thermophilia
MLLTWTVVVALAMAVRAMSPRSYPPSLLRDGLSTRAGGPSIPDDIVFRDMWMALSDLQETYFERWLGTWPDGIDWTRAVMGTHVAATLRTISDELRLSEPTQDAGCVTRKEDVVGGYFADVIAYYFAEDTFAIRNQAYDDMLWVVLAWLESIRFIDEHSRVVASGSSCSTESGAWPGAETWYGSRWIPAFAHRARIFWELAAKGWDTKLCGGGMIWNPRLMPYKNAITNQLFISASISMYLHFPGDTNSSPFSAGVGSALAGGVGTADWPPHDPIYGKAARDAHDWLASSNMTNAQGLYADGFHVSGQSTGSNNTRCDDRDEMVYTYNQGVLLSGLMGLYRATGQERYLREGHTLIRNVISATGYDLEQDKPVDPIHPDRVPPWRGLGRVGVLEEACDASGTCSQDAQTFKGIWMHHFAAFCAPAALRFTGSDSLGSQRPQPHGEAGAGAGAGTIRARHERECRRYIPWLRHNVRAATGTRDENGLFGMWWTAGLLTLTSGEAIEAAGDLHPLPPGGDGGEVVDYRNTGVPLDPKWTRAAGDGWSPAVPVPDAKRTGQAPLGHGQGVVVGGGSGSGEVKRAGSEKRAEALEESGAYDPNLRGRGRTVETQGGGLAVLRALWVVSRLEG

SEQ ID NO: 49 - DNA, 1056 bp, Myceliophthora thermophilia
  CDS (1)...(1056)
atgtcgtcttcacaacgcaagtcccctgtcgtgtacaccaatgctgtctactggcccaactaccgggtcttccatggggactcgccaggccagctgaactacgggtgcatcaaccgggtctactacgcctttgccacggtaacggcgaacggaggggtgtttctcagtaacgaggaggccgatgccgaggtagcctgtgacggagtcaagggagcgctggggtctctgatgcacctcaagcagaaacatacccatttacaagtcgtcttgtcgatcggcggcggcgcctcggccgaaacgtttcccatcgtggcatccagtcccatcctccgggacaactttgcccgctcggcccgtggcctactcgacgcatccggcctgaatggcattgacatcgtctgggagtatccttgcacaccggaacagggaagcgacttcctcgcgctggtcgcggcgatccgcatctacctccccgaggagcactacctgctcacggccaccctgccggccgtccgtgcagtcctccagaacatcgacctcggacaggcggccgagtacctcgacaccatcaacttggcggcgtacgacttcttcggtccctggtcgcacaagagcggacaccaagcgcagctgtacgctatgaacaaggacgagccatcgggcgcgagcggcgtccgggacctgatgtcggcgggcgtgccgagccgtaagatcctcctgggaatcccactctttggccgcagcttcctgcacgtttccgggccgggacacaagaaccggggcgcgggcggcggcccggatggctcgtttgagtactcccagctgccccgaaaggggactaaagagcaggtggacaagcgggccgtggcggcgcagtgcgtcggcggcgacggcggcttcgtctcgtacgacaacccggacacggtcagaatgaaggcagcgttttgcaagcagaagaggctcggagggctcttctactggagcgcgccgagcgactcgaaggatccgaaacggagtcttatcgcgacggggttcaaggcgctacacagctcttga

SEQ ID NO: 50 - protein, 351 aa, Myceliophthora thermophilia
MSSSQRKSPVVYTNAVYWPNYRVFHGDSPGQLNYGCINRVYYAFATVTANGGVFLSNEEADAEVACDGVKGALGSLMHLKQKHTHLQVVLSIGGGASAETFPIVASSPILRDNFARSARGLLDASGLNGIDIVWEYPCTPEQGSDFLALVAAIRIYLPEEHYLLTATLPAVRAVLQNIDLGQAAEYLDTINLAAYDFFGPWSHKSGHQAQLYAMNKDEPSGASGVRDLMSAGVPSRKILLGIPLFGRSFLHVSGPGHKNRGAGGGPDGSFEYSQLPRKGTKEQVDKRAVAAQCVGGDGGFVSYDNPDTVRMKAAFCKQKRLGGLFYWSAPSDSKDPKRSLIATGFKALHSS

SEQ ID NO: 51 - DNA, 1053 bp, Myceliophthora thermophilia
  CDS (1)...(1053)
atgatgctcacacgcttcgtggctggcctgctcggcatctccgccgcggatgccgccctcacctacagaggcgtggattggtcctcagtggtggttgaggaacgggccggcgtctcgtacaagaacaccaacgggaatgcccaaccgcttgagaacatcctggctgccaatggcgtcaacacggtgcggcagcgagtctgggttaaccccgcggacggcaactacaacctcgactacaacatcgcgatcgcgaagagggcgaaggctgccgggcttggcgtgtacatcgacttccactacagcgacacctgggccgatcctgctcatcagaccatgcccgctgggtggccgagcgacattgacaacctctcctggaagctctacaactacactctggacgccgccaacaagctccagaacgcgggtatccagcccaccatcgtgtccatcggtaacgagatccgggccggtctgctatggcccacagggagaaccgagaactgggccaacattgcccggttgttgcactccgctgcttggggtatcaaggactcgtcgctcagcccgaagccaaagatcatgatccacctcgacaacggatgggactggggtacccagaattggtggtacacgaatgtcttgaagcagggtacacttgagctgtccgactttgacatgatgggcgtctcgttctaccccttttactcgtcgtcggcaaccttgagcgccctgaaatcgagcttggacaacatggccaaaacctggaacaaggagattgccgtggtcgagaccaattggccaatctcttgtcccaacccaaggtacagtttcccctcggacgtcaagaacatccccttctcgccggaaggacagacgaccttcatcaccaacgtggccaacatcgtgtcctcggtaagccgcggcgtaggcctgttttattgggaacccgcttggattcacaatgcaaacctgggctcgtcgtgcgccgacaacaccatgttttcgcaatccgggcaggctttgtccagcttgtccgttttccagagaatctga

SEQ ID NO: 52 - protein, 350 aa, Myceliophthora thermophilia
MMLTRFVAGLLGISAADAALTYRGVDWSSVVVEERAGVSYKNTNGNAQPLENILAANGVNTVRQRVWVNPADGNYNLDYNIAIAKRAKAAGLGVYIDFHYSDTWADPAHQTMPAGWPSDIDNLSWKLYNYTLDAANKLQNAGIQPTIVSIGNEIRAGLLWPTGRTENWANIARLLHSAAWGIKDSSLSPKPKIMIHLDNGWDWGTQNWWYTNVLKQGTLELSDFDMMGVSFYPFYSSSATLSALKSSLDNMAKTWNKEIAVVETNWPISCPNPRYSFPSDVKNIPFSPEGQTTFITNVANIVSSVSRGVGLFYWEPAWIHNANLGSSCADNTMFSQSGQALSSLSVFQRI

SEQ ID NO: 53 - DNA, 843 bp, Myceliophthora thermophilia
  CDS (1)...(843)
atgcacttcacttcgtacctctcggttctgtccgtcctgggcaccagcggcggcgtcctggcctgggcaccccccagctacgacgggtacaggctggtctggtcggacgcgttcccgggcgcccccgggacgctgccgaacgagaacaactggaacatcatcacgggcaacctgggcgtcaacaacgagctcgaggtctaccagcgggacccgcgcaacctgcagatgagcggcggcaacacgctgcagatcgtcccctggctcgacggctccacctggtcctcgggccggatcgagtccaagtacaccttcacgccccagcccggcggccgcaccatggccgaggcccagatccgcttcggctccaacgacatcagcaccaagcagggcctctggcccgccttctggctgctcggcgactccatccgccacggcaccggctggcccgcgtgcggcgagctcgacattttggagaccatcaacggccagctgacgggctacggaaccgcccactgcaccgcctgcaatgaacccgtcggtcgcggtggctcggtccccatccccaatcaggacttccagcggtggcggatcgtctgggacctcaccaatggcgactggcgcgcccagaccatcacctggttcatgaacgaccagcagttccaccagctcagcggtgctaccatcggagaccagggcgtctggtccaccctgactaacaagccgctcttcttcatcctcaacatggccgtcggcggcaactggcccggctatcccaacgacaggacccagggtggctacggagccatgatggaggtgggctatgttgctcattactcgacctag

SEQ ID NO: 54 - protein, 280 aa, Myceliophthora thermophilia
MHFTSYLSVLSVLGTSGGVLAWAPPSYDGYRLVWSDAFPGAPGTLPNENNWNIITGNLGVNNELEVYQRDPRNLQMSGGNTLQIVPWLDGSTWSSGRIESKYTFTPQPGGRTMAEAQIRFGSNDISTKQGLWPAFWLLGDSIRHGTGWPACGELDILETINGQLTGYGTAHCTACNEPVGRGGSVPIPNQDFQRWRIVWDLTNGDWRAQTITWFMNDQQFHQLSGATIGDQGVWSTLTNKPLFFILNMAVGGNWPGYPNDRTQGGYGAMMEVGYVAHYST

SEQ ID NO: 55 - DNA, 1806 bp, Myceliophthora thermophilia
  CDS (1)...(1806)
atgctttccgtcaggaggaggggcttcttcgccctgttccccgccgccgccatcctgctgctgttcctggtgacgtacttgcgggagggcgtagtgacggtgccaaagctaagcggccgcctcggagggctaccgagcggagacgaggagccgaccttttgggcaaggctccccgtccactacccgccctcccacatccgcccgctgcccaccggcaagcccgtccggtacccgcgggtacaagcagcgacgttccccgtcgagaaggacccggacgcgcgggcccggcggcgggagcgccgggcgatcgtccgggacgtcttccacaaggcctggctgtcgtaccgggagctcgcctggggcgccgacgagctggctcccctgtcgggcgggaccaagaacccgtttggcgggtggggcgccaccttggtcgacgcgctcgacacgctgtggatcatgaatctccggcccgagttcgacgaggcggtcgccagggcggcgaccatcaacttcaccagcaccgacctgcccgagctcaacgtgttcgagaccaacatccgctacctcggcggcttcctgtccgcctacgacctgagcggcgacggccgcctgctgcgcaaggccgtcgaggtcggcgacatgctctacaaggccttcgacacccccaaccgcatgcccatcgcccgctgggacctccacgcggccgcccggggtgccgagcaggtggccgggaaggccctcctcgccgaggtcgccaccctgtccatggagttcacccgcctgtccatgctgacgggcgaccccaagtggttcgacgccgtgcagcgcgtcgccgacgccatggccgcccagcaggactcgaccgccctcccgggcctctggccgctcgaggtcgacggcaagacggccgtcttcaactccggatccgtcttcgccctcggcgccatggccgactcggcgtacgagtacctgcccaagatggcggcgctcacgggcggccggctgcccgtctaccggcgcatgtacgagaaggcggtcgacgccgccgtgaagcacaacatcttccgccccctgacgcccgccgacgaggacatcctcatcgccggcaacgcgcacgccaaggagcacggcatcgagctcgagccccagggccagcatctcgcctgcttctggggcggcatgatggcgctggccgcccgcctcttcggccgcgacgaggacatggaacccgcgaggaagctcgtcgagggctgcatctggacctacagggccttcccccacggcgtcatggccgaggcattcacgatggcgccttgtcctgctggagcggtggcgggtgacgacgagtgccggtgggacgaagccgcctggaagcgcgaggtcctccgcagggccgggaaggaccccgacgccgcggggagcgacgcggaggccgacgccatcatcaagaaggaccggctacccgagggcttcacctcgatcagcgaccgggcctacgtcctgcggccggaagccatcgagagcatctttgtactctaccgcgtcacgggccgggaagacctcccggaggcggcgtgggacatgtttaccgccatcgacagggtgacgagcaccgagctggccaacgcggccgtccgcgacgtcaccaccccggagaccccggagcaaaaggactcgatggagtcgttctggctggccgagaccctcaagtacttctacctcatcttcagcgaccccgagctgatcagcctggacgagtacgtgttcaacacggaggcgcaccccttcctgcggccgctgaagtag

SEQ ID NO: 56 - protein, 601 aa, Myceliophthora thermophilia
MLSVRRRGFFALFPAAAILLLFLVTYLREGVVTVPKLSGRLGGLPSGDEEPTFWARLPVHYPPSHIRPLPTGKPVRYPRVQAATFPVEKDPDARARRRERRAIVRDVFHKAWLSYRELAWGADELAPLSGGTKNPFGGWGATLVDALDTLWIMNLRPEFDEAVARAATINFTSTDLPELNVFETNIRYLGGFLSAYDLSGDGRLLRKAVEVGDMLYKAFDTPNRMPIARWDLHAAARGAEQVAGKALLAEVATLSMEFTRLSMLTGDPKWFDAVQRVADAMAAQQDSTALPGLWPLEVDGKTAVFNSGSVFALGAMADSAYEYLPKMAALTGGRLPVYRRMYEKAVDAAVKHNIFRPLTPADEDILIAGNAHAKEHGIELEPQGQHLACFWGGMMALAARLFGRDEDMEPARKLVEGCIWTYRAFPHGVMAEAFTMAPCPAGAVAGDDECRWDEAAWKREVLRRAGKDPDAAGSDAEADAIIKKDRLPEGFTSISDRAYVLRPEAIESIFVLYRVTGREDLPEAAWDMFTAIDRVTSTELANAAVRDVTTPETPEQKDSMESFWLAETLKYFYLIFSDPELISLDEYVFNTEAHPFLRPLK

SEQ ID NO: 57 - DNA, 1452 bp, Myceliophthora thermophilia
  CDS (1)...(1452)
atgcttattcactcggcgctcctggcgctcggcgcaaccctcgccgcagctgtccagcccctcgaggttcagggccagtacttcgtcaaccccaagacgggcaaccgcttccagattgtcggcgttgcctatcagcccggcggctctgctggctacgacaaggcggccggccgtgaccccctgagcgaccccgatatctgcctgcgcgatgccgccctgctccagatcctcggcgtcaataccatccgcgtctacaatgtgaatcccgacgtgaaccatgacgagtgcgccagcatcttcaacgccgccggcatgtacatgatcctcgacgtcaactcgcccctggtgggcgagtccctgactagctacaacccctgggagtcgtactatgccgcctatctcaaccgcaccttcgccgtcgtcgaggccttcaaggactatcccaacaccctggccttcttctccggtaacgaggtcatcaatgacgagaagagcggcgctgatgtgccgccctatatgcgtgccgtcacccgcgacatcaagaactacgtcaagaaccacgcctcgcgtcccatcccggtcggctactccgccgctgacgtccgcgacatcctcttcgacacgttcaactacttcgagtgctcgctggagggcgacgatgacgacatgagcaagggcgacatctttgccctcaacagctacagctggtgcggcgacagcagcttcaagaaggccagctacgaccagctcgtcagcggcttcaagggcagctctgtccccatcttcttctcggaatatggctgcaacaccccctctccccgtatcttcaccgaggtcggcaccatctacggcgaccagatgacgggcgtcttctcgggcggcgtcgtctacgagtacacccaggagaagaacaactacggcctggtctcgatggaggacgacggctccgcccagctcaggagcgactacgtctcgctcgagaagcagtacagcaagctcgactttgcctccatccagggccagaagcccccctcggactcgaccaacaaggcccccgtctgcagctccaagctcatcaccaccgataacttcaacaacaacttcaccctccccgtcccgccccccggcgcccagaagatcattgacgagggcgtcaagcccgcccccaagggcaagctcgtcgagatctccaactggaaggtcaagttcaccgtcaagaaccccgacggctccgtcatcaccaacctcgccgtcaagccgcttgaagacgacgcgatcaacagccccggtaccaacactgaggccggcactcagacctccgctgaggagaccactggcaccgacagctcggcgtcccccagcgacaccaacgccgccgccgggctggatgctcgtgtcctgcctgccgtggccatgggcgctcttgccctcgctgctgccgctgccttctaa

SEQ ID NO: 58 - protein, 483 aa, Myceliophthora thermophilia
MLIHSALLALGATLAAAVQPLEVQGQYFVNPKTGNRFQIVGVAYQPGGSAGYDKAAGRDPLSDPDICLRDAALLQILGVNTIRVYNVNPDVNHDECASIFNAAGMYMILDVNSPLVGESLTSYNPWESYYAAYLNRTFAVVEAFKDYPNTLAFFSGNEVINDEKSGADVPPYMRAVTRDIKNYVKNHASRPIPVGYSAADVRDILFDTFNYFECSLEGDDDDMSKGDIFALNSYSWCGDSSFKKASYDQLVSGFKGSSVPIFFSEYGCNTPSPRIFTEVGTIYGDQMTGVFSGGVVYEYTQEKNNYGLVSMEDDGSAQLRSDYVSLEKQYSKLDFASIQGQKPPSDSTNKAPVCSSKLITTDNFNNNFTLPVPPPGAQKIIDEGVKPAPKGKLVEISNWKVKFTVKNPDGSVITNLAVKPLEDDAINSPGTNTEAGTQTSAEETTGTDSSASPSDTNAAAGLDARVLPAVAMGALALAAAAAF

SEQ ID NO: 59 - DNA, 3159 bp, Myceliophthora thermophilia
  CDS (1)...(3159)
atgcctgtcttcgatggccacgagtacctcaccgaagaagagcggaggttgaaggaggaccgcgagcggaagaagtactggaagaaatggggatcctacctctctgagaggcagtgggcgaccgtgcgcgaggattacagcgcggacggagatgcttggagtcacttcccgcacgatcatgcccggtcccgcgcgtacagatggggcgaggacggcattgctggtgtttgcgacacgcatggcctgcagaacattgcgtttgctttctggaacgagaaggacccattcctcaaggaacgactgttcggcttgtccaacccacaggggaaccacggtgagagcatcaaggaggctcattttcacttggacaatacgccacactcgtatatgaaatacctgtacaagtacccgcagaaggagttcccttacgaggatctgctcaaggagaatgcgaggcgcggcaaacaggacagggaatatcagattctcgacaccggcgtcttcgacgaggaccgctactgggatatcttcatcgaaaccgccaaggaagacgatgacccggatgagctcctcttccgcgtgactgcatggaacaggggccccgagcgcgcacctctccacatcatcccgcacgtctggttccggaatacctggtcatggggccgcgaacccgcagagaaccggccttctatgggtgtctacgatgagaacttgataaagtcgaagcatcaccgcttaggagagcgttatgtcctcttctcgccatcgcccggcgtcggacctagcggggaggatgttcagccggacttgctctttactgagaacgaaacgaactttgagctcctgtatggtgggaaaaatgagtcaaaatacgtcaaggacgcgttccatcgctacatcgttaaccgcgagaaggacgccgtgaatccggctcaggttggaaccaaagcggccgcctggttcgcgttcaatgaagcaggcggtgtcaatcctggcgagtgcgcagttgttcgcttccgattctccaggaaagccgagacatacctcgatgaggaggaattcgacgatatcattgagaggaagcgggaggaagctgacgatttttattaccacatcagccccctgccgatgtctgatgatctccgcaacatccagaggcaggccttcgccggtatgatgtggtgcaagcaacactacctgttcatctgggacgagtgggcacatggcgaccccagccagccgccgccgccacccggccggaaggggattcgcaacgctgcctggaaacacttgcactgtgacgacattctctcgatgccagactcctgggagtacccattcttcgccgcgtgggatacgagcttccactgcatcacattggccatgatggacccggacttcgccaagaagcagctggatctcttcacccgcgagtggtactgccatcccaatggccaacttcctgcatacgagtggaactttggcgatgtcaatcctcctgtccacgcctgggcgacgttccgcgtgttcaagatcgagcgcaagttgtacggcaggcaagacctcgacttcctcgagcgggtctttcagaagttgttgctcaacttcacctggtgggtgaaccggaaagacgttgagggcaagaatgtctttgagggtggcttcctcgggctggataacatcggcttgttcaaccgctcggagccactcccaaccggcggcacgctggaacaagcggacagcacgggctggatggctttctactgtctcaacatgctcaacattgccctggagctcgccaaacatcggcggatctacgaggacattgctaccaagttctttgagcactttgtcctcatcagtgacgccatgacgttccggatgggtcagaaggacgagaagtcgctctggaacgaagaagacggcttctactacgacgcgatttcgtggggcggcccctggattcagcagatgcctgtcaggtccctggttggcctgatccccctgtacgcgactctcacgctcgaacccgagctcatcaacaagctccccaccttcaaaaagcgcgttgagtggttcatggccaaccgctgcgatgttgccgaaaggacaatgcacagcatccgcacccgcggcaagggcaacaggatcctcctgtcgcttgtgaacaaggagcggctcatcaagatcctcgagcgtatgctggatgaagacgaattcttgagcccacatggtatccgttccctgtccaagtaccacaaggatcacccttactccatgcaagttaacggccaggtcttcaaggtcggctatgtccctggcgactcggacagcggccttttcggcggcaacagcaactggcggggaccaatctggctgtgtgtcaacttcctcctggtcgagtcgctccagcgcttctacctattttttggacaggatctgaaagtcgagtgccccgtgggatcaggcgattacatgcatcttgggcatgtctcggaggagatacagcaccggctgcagcatctctttgctcgcgacaacgacggccgccgcagcatcaacggcggcaacgacatcctcgacttcgatccgcattggagagactatctctggttctacgagttctttgacggagacaccggccgcggccttggtgcaacccatcaatgtggttggacaggcctcatcgcacggatgatccacgacactggcgtaaactgccgcctcccacaaaccccacgcaccccgcgtgctggtctgtcccactactttgacgacatcctccaccgcggcgcatacctgaacgggccccagacccctatgctctcccctaccgccccgcgcctccgccgcagctcgaccagccgctcgctcgccgcccgcagcgactacagcgtaagcgatataaacctcaacgtcgggtatgacgggcacagtgacgaggacgagaatggcgagggtggcggcggaacgaattctttaagaagggggtcagtcaacccggcgctgctcaacgatccggaaagggtcaaggcgagggccgaggcggacgcgcacctgcattcgtacatcacccagcagctcgagaaggtcaagatggagaggctagaggatggatatgagactctcgaaggggacgaattcgagaccaaggcttag

SEQ ID NO: 60 - protein, 1052 aa, Myceliophthora thermophilia
MPVFDGHEYLTEEERRLKEDRERKKYWKKWGSYLSERQWATVREDYSADGDAWSHFPHDHARSRAYRWGEDGIAGVCDTHGLQNIAFAFWNEKDPFLKERLFGLSNPQGNHGESIKEAHFHLDNTPHSYMKYLYKYPQKEFPYEDLLKENARRGKQDREYQILDTGVFDEDRYWDIFIETAKEDDDPDELLFRVTAWNRGPERAPLHIIPHVWFRNTWSWGREPAENRPSMGVYDENLIKSKHHRLGERYVLFSPSPGVGPSGEDVQPDLLFTENETNFELLYGGKNESKYVKDAFHRYIVNREKDAVNPAQVGTKAAAWFAFNEAGGVNPGECAVVRFRFSRKAETYLDEEEFDDIIERKREEADDFYYHISPLPMSDDLRNIQRQAFAGMMWCKQHYLFIWDEWAHGDPSQPPPPPGRKGIRNAAWKHLHCDDILSMPDSWEYPFFAAWDTSFHCITLAMMDPDFAKKQLDLFTREWYCHPNGQLPAYEWNFGDVNPPVHAWATFRVFKIERKLYGRQDLDFLERVFQKLLLNFTWWVNRKDVEGKNVFEGGFLGLDNIGLFNRSEPLPTGGTLEQADSTGWMAFYCLNMLNIALELAKHRRIYEDIATKFFEHFVLISDAMTFRMGQKDEKSLWNEEDGFYYDAISWGGPWIQQMPVRSLVGLIPLYATLTLEPELINKLPTFKKRVEWFMANRCDVAERTMHSIRTRGKGNRILLSLVNKERLIKILERMLDEDEFLSPHGIRSLSKYHKDHPYSMQVNGQVFKVGYVPGDSDSGLFGGNSNWRGPIWLCVNFLLVESLQRFYLFFGQDLKVECPVGSGDYMHLGHVSEEIQHRLQHLFARDNDGRRSINGGNDILDFDPHWRDYLWFYEFFDGDTGRGLGATHQCGWTGLIARMIHDTGVNCRLPQTPRTPRAGLSHYFDDILHRGAYLNGPQTPMLSPTAPRLRRSSTSRSLAARSDYSVSDINLNVGYDGHSDEDENGEGGGGTNSLRRGSVNPALLNDPERVKARAEADAHLHSYITQQLEKVKMERLEDGYETLEGDEFETKA

SEQ ID NO: 61 - DNA, 2010 bp, Myceliophthora thermophilia
  CDS (1)...(2010)
atgttctccaggcacgacaacaggctcgtctactcgtacgacgccgagaagctctggatcgagccgtggggccccgattcgctgcgcatccgcgcgacccagctcagcgcgatgccgcccgaggactgggccctcctgccgcctcccgaaccagccaccagcccggagatcaccatctccccggactcggctacgctcaccaacggcaagatcagggccaccgtcagcgcgcggggcaagctcaccgtgtctgacgcccgcacgggcaccgtcctgctcgaggagtattcgcgcaaccggctggacgtgcgggaccccaagtgcagcgcgctcaacgtggccgcgcgcgagttcaaggcggtgccgcggggcggggacgcgcaccacatcacggcgcggttcgagagcctggaccggcaagagcgcctcttcggcatgggccagtaccagcaaccgctcttcaacctcaagggcgccgacctcgagctggcccaccgcaactcgcaggccagcgtgcccttcctgctctcgtcgcgcggctacggcctgctgtggaacaacccggccgtcggccgcgccgtcctcggcaccaacctcatgaccttcgaggcctactcggcccgcgccctcgactactgggtcgtggccggcgaccgcccggccgacatcgtccgcgcctacgccgccgccaccggcagggtgcccatgatgcccgagttcggcctcggcttctggcagtgcaagctgcgctaccagacccaggaggagctgctcggggtcgcgcgcgagtaccgccggcgcgggctgccgctcgacgtcatcgtcgtcgacttcttccactggcccctgcagggcgagtggaagttcgacccggcctactggcccgacccggacgccatggtgcgggagctcaaggagttgggcgtggagctgatggtgtcggtctggccgacggtcgacaagcggtccgagaactgggacgagatggtcgagcgcggcctgctggtccgcgtcgaccggggcatgcgcaccacgatggacttccagggcgacacggtccacttcgacgcgaccaacccggcggcgcgcgagttcgtgtgggccaaggtgcgccagaactactacgccaaggggatccggctcttctggctcgacgaggccgagcccgagtactcggcctacgacttcgacaactaccgctaccacagcggctccgtcctgagcaccggcaacatctacccggccgagtacgcgcgcgccttctacgagggcctcgcgcgcgagggccacgccgacgacgccgtcagcctcgtccgctgcgcctgggccggcagccagcggtacggcgcgctggtctggagcggcgacgtcgcctcgtcctggtccagcttccgcagccagctggccgcgggcctgcacatggccgtcgccggcctgccctggtggaccaccgacatcggcggcttccacggcggcgacccgcgcgagccggccttccgcgagctcttcgtccgctggttccagtggggcgccttctgccccgtcttccgcctgcacggcgaccgcgagccccgccagccccagcacggcaccaccggcggcgccgcctgcctcagcggcggcccgaacgaggtctggtcctacgggcccgaggtgtacgagatctgcaagaagtacatggccctccgcgagcacatgcgcccttacgtccgccggctgatgcggcaggcccacgaggacggcacgccggtcatgcgccccctcttcctcgagttcccggacgatccccgctgttggaacacgggcgaggagtacatgttcggggacaagtacctggtttgcccggtcatgcagccgggcgtcgctaagctcgccgtgtacctgcctgccggcgccaagtggtcggcgctcgaaggcggcggcggcggcgaggagattgagggcggccaggtaattgaggcagactgccccatcgactacatgccggtgtttgtgagagtagctgcgtaa

SEQ ID NO: 62 - protein, 669 aa, Myceliophthora thermophilia
MFSRHDNRLVYSYDAEKLWIEPWGPDSLRIRATQLSAMPPEDWALLPPPEPATSPEITISPDSATLTNGKIRATVSARGKLTVSDARTGTVLLEEYSRNRLDVRDPKCSALNVAAREFKAVPRGGDAHHITARFESLDRQERLFGMGQYQQPLFNLKGADLELAHRNSQASVPFLLSSRGYGLLWNNPAVGRAVLGTNLMTFEAYSARALDYWVVAGDRPADIVRAYAAATGRVPMMPEFGLGFWQCKLRYQTQEELLGVAREYRRRGLPLDVIVVDFFHWPLQGEWKFDPAYWPDPDAMVRELKELGVELMVSVWPTVDKRSENWDEMVERGLLVRVDRGMRTTMDFQGDTVHFDATNPAAREFVWAKVRQNYYAKGIRLFWLDEAEPEYSAYDFDNYRYHSGSVLSTGNIYPAEYARAFYEGLAREGHADDAVSLVRCAWAGSQRYGALVWSGDVASSWSSFRSQLAAGLHMAVAGLPWWTTDIGGFHGGDPREPAFRELFVRWFQWGAFCPVFRLHGDREPRQPQHGTTGGAACLSGGPNEVWSYGPEVYEICKKYMALREHMRPYVRRLMRQAHEDGTPVMRPLFLEFPDDPRCWNTGEEYMFGDKYLVCPVMQPGVAKLAVYLPAGAKWSALEGGGGGEEIEGGQVIEADCPIDYMPVFVRVAA

SEQ ID NO: 63 - DNA, 966 bp, Myceliophthora thermophilia
  CDS (1)...(966)
atgaagagatccggccttctggggacggtggctcttctgttcccggccctcgtttctgcctatgcgctcccgggcgaatgtactggagtctgcaacaactcccacgacccgtcaatcatccgccgcgcagatgggacgtacttccgcttctcgactggtggcaagatcgccattcacacggcgccgagcctgaccggcccgtggacctataggggcgccgccttgccggccgggtcctccatcaacttggacgggaaccaggacctctgggcccccgatgttgcacaggtcggagaccagtactacctgtactactccgtcagcaccttcggcgtccagaactcggccatcggcatagcccgctcatcgagcctggacgccggcacctggaccgacctcgggtctaccggtgtcacctccagcacgggctcggcgtacaacgccatcgacggcaacctgatcaacgagccggggaccagcaactacttcctcacgtttggcagcttctggaacggcatccatcgcgtccgcatgacgcccaccaagacgaacggcaacgtgtaccaggtcgcctttgatcccaacgacccggccatggaaggcccgaccgtcttcaagtacggcgactactactaccttttcttctccaagggcacgtgctgcggctacgaccagaacaggccgcccgccggacaggagtacaggatcatggtgtgcaggtcgacctcgcccaccggccccttcgaggacagggacggcaagtcgtgccgctcgggcggtggaactctggtgctcccgtctcacgactgggtgtacggccccggcggccaaggtgtctaccaggaccccgaacacggaccggtcttgtactaccattatgttgatactcgcattggctatgcggacggccagaagaagtttggttggaatcgcatcgacttttcaagcggttggccggttgtctga

SEQ ID NO: 64 - protein, 321 aa, Myceliophthora thermophilia
MKRSGLLGTVALLFPALVSAYALPGECTGVCNNSHDPSIIRRADGTYFRFSTGGKIAIHTAPSLTGPWTYRGAALPAGSSINLDGNQDLWAPDVAQVGDQYYLYYSVSTFGVQNSAIGIARSSSLDAGTWTDLGSTGVTSSTGSAYNAIDGNLINEPGTSNYFLTFGSFWNGIHRVRMTPTKTNGNVYQVAFDPNDPAMEGPTVFKYGDYYYLFFSKGTCCGYDQNRPPAGQEYRIMVCRSTSPTGPFEDRDGKSCRSGGGTLVLPSHDWVYGPGGQGVYQDPEHGPVLYYHYVDTRIGYADGQKKFGWNRIDFSSGWPVV

SEQ ID NO: 65 - DNA, 765 bp, Myceliophthora thermophilia
  CDS (1)...(765)
atgctcgccgagactgtcctcgccggccttgcgctagcctccagcgccatcgccgcgccggcaccgaacccgatcgagtttgtaaagcgggccccaacccccggcgtggtcatccagaagtgcagcacccccggagtgctcgcccttgcctacgacgacggcccgtaccagtacacgtcgcggctggtggacatcctcgacgccgccggcgccaaggccaccttcttctggaccgggacgctctacggctgcatctacaaccaggctaacgcggtcaagaaggcctttgcctcgggccaccagatcgcctctcacacatggacccacccccactgggccagcttgggcgaggcgcagatccggcaggagatcaccaagctcgaggacgccttcgtcaacctgatcggcaagaagccggcgtacgtgcgcccgccctatctcgagacgggcggccaggtcctgccggtgctgaggtcgttgggctacaaggtcatcaccaacgacatcgacacgggcgactggaaccactattcgccccagcagagcgagcaggccttcctgcaggccggcgccggcggcaacgggcacatccccctcatgcacgagacctacgactccaccgtcaacgttctcaccccctggctgatcaactgggccaagcagaacaacctgaagctcgtcactgtcgccgagtgcttgggcgaccccgacggcgcgtaccaggccggtaactttgagcctaatggccagaacagctgctattag

SEQ ID NO: 66 - protein, 254 aa, Myceliophthora thermophilia
MLAETVLAGLALASSAIAAPAPNPIEFVKRAPTPGVVIQKCSTPGVLALAYDDGPYQYTSRLVDILDAAGAKATFFWTGTLYGCIYNQANAVKKAFASGHQIASHTWTHPHWASLGEAQIRQEITKLEDAFVNLIGKKPAYVRPPYLETGGQVLPVLRSLGYKVITNDIDTGDWNHYSPQQSEQAFLQAGAGGNGHIPLMHETYDSTVNVLTPWLINWAKQNNLKLVTVAECLGDPDGAYQAGNFEPNGQNSCY

SEQ ID NO: 67 - DNA, 2694 bp, Myceliophthora thermophilia
  CDS (1)...(2694)
atgacacaacacactgcccgtgtcctctcgtccggctgggagtttaagtcggacgcggatgagaaatggctcccggtctcggggtcccccagcaacgtccataccgatctgatgcggcatggtctgatacccgacccattccaagacactaacgaactggaagtccgctgggttgccgagcggacgtggcggtatcgaacctcgtttgcgacgccgagttgttatgggcgggcccggggagtcagggtcgatctcgtgttcgaggggctcgacaccttcgcgacggtgacgctcaatggccaggtcattctgcggtcggacaatatgttcctcgagcaccgagtcgacgtcggcgacgttctggtggacggcgccgaagaggagagcatcaacaccttggagatcgcgttcgagcctgcgggccggcggggcctggaactcgtccgggcccatcccgagcacgagttcattgttcaccagacggaggtcagcagggggccggtccggaaggcccaatatcattggggctgggattggggccccatcctcttgacgtgtggcccgtggaaaccggtaaggctggagacatatgtcggcaggatcgaagacgtcagggtagactacgagatttgcagcacgggccgggcggagggagatgggcgcccgatcgtcgaggcgaccgtgcacgctcacgtcttgggcccggcggcggagctcgaggccgagctgctcctatccggtgaacgagtggccagttggagggaccgcatgggcgacgatgccgccgctggtggtccgccgccgtcgtcgtcgtcgtcgtcgcggcgatactcgtccccccggctccggatcgagcgggcggagctgtggtggccgcgaggatacggtccgcagtccctatacgagttgaagctgcggatcctggccgcggacgggttgacggtcttggcggaggagcaccggaggatcgggtttcgcaaggtcgagctgatccgagaagaggatcggttcgggcaatccttctacttccgcgtcaacggcgtggacgtgttctcgggcggctcttgctgggtccccgcggacagcttcctgcccgagatctctccggagcgctaccgggactggatccggctggtcgccgagggcaaccagaacatggtccgcgtctggggcgggggcgtctacgagccggacgtcttctacgcggcatgcgacgagctcggcatcatggtctggcaggacttcatgttcgcctgcgcgtcgtacccgacctacccggccttcctcgactcggtcgcccgggaggcgcgccaggcggtccggcgcctccggcaccacccgtgcgtcgtgctctggtgcggcaacaacgaggactaccagctggtcgagcggtacgggctcgagtaccgcttcgaggaggacagggacccggcgtcctggctccggtcgaccttcccggcgcggtacatctacgagcacctgctcccgggcgtggtgcgagacgagaaccccgcgggggcaggggcgaccccttaccacccgggcagcccctggggcgacggcaggagtacgacgctccgggtcgacccgacggtcggcgacgtgcaccagtgggagctctggaacggcgaggcgcggccgtggcagttgcttccgcggatgggcgggcggtttgtgagcgagttcggcatgttgagccacccgcacgccgacacggtcgcgcgcttcgtctcggacccggcggagcggcgcgcggggagccggacgatggacttccacaccaaggcggtcgcgcacgagcgcaggctgctcgcgtacgtgggcgagaacttcggggtcgcccgggccgccgggggcgggggcgcgggagcgttcgcgcacctgacgcaggtggtgcaggcggacgcggtcgcggccgcgtaccggtcctggcggaggcactggggccggccgggggagcggcggtgcggaggcgtgctggtctggcagctcaacgactgctggcccgccgtctcgtgggccgtggtggactactacctggtcaggaagccggccttctacgcgatccggcgggccctggcgccgctcgccgtgggcgtggcgcgcaagttccacgactggacgacccggccggccgacgcgctctggcggcggaacacgggccacgtcgacccgcgcgggatgctgaccgacgtcgagttcgacgtctgggtctccagctcgaggtcggacgccgtgcgggcgagggcggtcgtgcgcttcgtctcggtccggtcgggccgcgaggtgggggaccggatcgagcgcgaggtgcaagtagggccgaacggctgcaccgagctgctggtgggttacaagttcgactggcgcacggcggcggtggccgaaccggagcactttgtcatccacgtggcgctgtgggtgggtggcgtccaggtcagcagcgatacctcgtggcccgatccgatcaagtacctcgacttcccggacaggggcgtctcggtgaggcacctcggccccggcctcgtcgaggtctcggcccagcggccggtaaaggggtttgtcttctccgagaagcgcggcgtcaagcttagcgacaacggcttcgatctggtgcccggagacgaacccaagagggtagaggtccaaggctgtgaggtcgatgaactctcatggactttcgtcggtcaatga

SEQ ID NO: 68 - protein, 897 aa, Myceliophthora thermophilia
MTQHTARVLSSGWEFKSDADEKWLPVSGSPSNVHTDLMRHGLIPDPFQDTNELEVRWVAERTWRYRTSFATPSCYGRARGVRVDLVFEGLDTFATVTLNGQVILRSDNMFLEHRVDVGDVLVDGAEEESINTLEIAFEPAGRRGLELVRAHPEHEFIVHQTEVSRGPVRKAQYHWGWDWGPILLTCGPWKPVRLETYVGRIEDVRVDYEICSTGRAEGDGRPIVEATVHAHVLGPAAELEAELLLSGERVASWRDRMGDDAAAGGPPPSSSSSSRRYSSPRLRIERAELWWPRGYGPQSLYELKLRILAADGLTVLAEEHRRIGFRKVELIREEDRFGQSFYFRVNGVDVFSGGSCWVPADSFLPEISPERYRDWIRLVAEGNQNMVRVWGGGVYEPDVFYAACDELGIMVWQDFMFACASYPTYPAFLDSVAREARQAVRRLRHHPCVVLWCGNNEDYQLVERYGLEYRFEEDRDPASWLRSTFPARYIYEHLLPGVVRDENPAGAGATPYHPGSPWGDGRSTTLRVDPTVGDVHQWELWNGEARPWQLLPRMGGRFVSEFGMLSHPHADTVARFVSDPAERRAGSRTMDFHTKAVAHERRLLAYVGENFGVARAAGGGGAGAFAHLTQVVQADAVAAAYRSWRRHWGRPGERRCGGVLVWQLNDCWPAVSWAVVDYYLVRKPAFYAIRRALAPLAVGVARKFHDWTTRPADALWRRNTGHVDPRGMLTDVEFDVWVSSSRSDAVRARAVVRFVSVRSGREVGDRIEREVQVGPNGCTELLVGYKFDWRTAAVAEPEHFVIHVALWVGGVQVSSDTSWPDPIKYLDFPDRGVSVRHLGPGLVEVSAQRPVKGFVFSEKRGVKLSDNGFDLVPGDEPKRVEVQGCEVDELSWTFVGQ

SEQ ID NO: 69 - DNA, 1179 bp, Myceliophthora thermophilia
  CDS (1)...(1179)
atgccaaccacgtacgccggcatcacctcgcaagaggtgcacgccaagatcgagctgctcatctcggccatggtcaacatccgggacaagacgggcgagttcctgctgacgctgccggacgggcgcgtcatcgacaccaaggggtggcaggactgggagtggacgcacggcatcgggctgtacggcatctggcagtactaccagctgaccaacgagccgcgctacctggccatcatcgaggactggttcgccgcccgcttcgccgccggcggcaccaccaagaacatcaacaccatggccgccatgctcaccctcgcctgcgtctacgagcggacgggcaacccggcctacctgccctggctcgacgcctgggccgagtgggcctaccacgacctggagcgcacccgccacggcggcatgcagcacatcacctacctcgaggagaaccgcgaccagctgtgggacgacaccctcatgatgaccgtcctgcccctcgccaagatcggcttcgtcctccgccgcccccactacgtcgacgaggcccgccgccagttcctcctccacgtccagtacctgttcgacgccaagaccggcctcttcttccacggctggcagttccacgaggacggccgcccgggcggccacaacttcgccgaggcccgctgggcccgcggcaacagctggctgaccatcgccattcccgagttcctcgaactgctgcgcgagggcgccgccagcagcagcagcagcaacggcggcagcagcaacgacgtggcgctcgaggcgtttctgcggagcacgctgcgggcgcagtgcgaggcgctgcggccgctgcaggatccgacgacgggcctgtggcggacgctgctggacgtgcccgagtcggaagggtcgtacgcggaggcgagcgcgacggccgggttcgccttcggcgtgctcaagggcctgcggcggcgggacctgcccgcgggggccggcgagttcgaggacatggccgtccgcgccgtccgcgccgtcctggccaacgtcagcgacgacggcgagctgctcaacacctccttcggcaccggcatgggccgcgacctgcagcactacaaggacatccccgtcaccagcatgccctacgggcaggccatggccatcatggcgctggtcgagttttcgaggagatttatctga

SEQ ID NO: 70 - protein, 392 aa, Myceliophthora thermophilia
MPTTYAGITSQEVHAKIELLISAMVNIRDKTGEFLLTLPDGRVIDTKGWQDWEWTHGIGLYGIWQYYQLTNEPRYLAIIEDWFAARFAAGGTTKNINTMAAMLTLACVYERTGNPAYLPWLDAWAEWAYHDLERTRHGGMQHITYLEENRDQLWDDTLMMTVLPLAKIGFVLRRPHYVDEARRQFLLHVQYLFDAKTGLFFHGWQFHEDGRPGGHNFAEARWARGNSWLTIAIPEFLELLREGAASSSSSNGGSSNDVALEAFLRSTLRAQCEALRPLQDPTTGLWRTLLDVPESEGSYAEASATAGFAFGVLKGLRRRDLPAGAGEFEDMAVRAVRAVLANVSDDGELLNTSFGTGMGRDLQHYKDIPVTSMPYGQAMAIMALVEFSRRFI

SEQ ID NO: 71 - DNA, 858 bp, Myceliophthora thermophilia
  CDS (1)...(858)
atgcgtgccgctctagccttgttggctctctactcgtcgctggcttgcgccacgccggctcccgcctaccccggcttcaagctgttgtggtcggatagcttctcaggtgccgccggagatacgcccgaccagaagaaatggaacatcatcaccgacgtccaaaccaacggcgaggtgcagaactactccaagtcgaataagaacctgcagatctcggggggtgacacggtgcagctggtgccgttcaagtcccccaagggcacgtggacgtcggcgcggatcgagtccaaggaggcgttcacgcccccgcagggcaagctgaccatgttcgaggcggcgatccggttcggcgacacgccggcggtgaacaagcagggcatctggcccgcgttctggctgctcggcgacgccgtccaccacggcaccccctggccgcgctgcggcgagctcgacatcatggagacggtcaacggcctgcccgccgcctacggcaccacacactgcggcaacggcgagcaaggcgggccctgcaacgagcccatcggccgcggcgccgccgtccccctgctcgactacggctggcacacctggaccctgcagatcgaccgcaccaacgcctccggcgactggaaggacgaggtcatccgctggctggttgacggcaacgtcttccaccagatccgcggctccgacattggcgaccagggcatctggggcactctcgtgcactcgcccatgttcatcatcttgaacgtggccgtgggcggcaactggccgggtgctcccaacagcctgacggccgacggctatggcagcatgatggaagttgagtacgtggctgtgtacacgtcctcttag

SEQ ID NO: 72 - protein, 285 aa, Myceliophthora thermophilia
MRAALALLALYSSLACATPAPAYPGFKLLWSDSFSGAAGDTPDQKKWNIITDVQTNGEVQNYSKSNKNLQISGGDTVQLVPFKSPKGTWTSARIESKEAFTPPQGKLTMFEAAIRFGDTPAVNKQGIWPAFWLLGDAVHHGTPWPRCGELDIMETVNGLPAAYGTTHCGNGEQGGPCNEPIGRGAAVPLLDYGWHTWTLQIDRTNASGDWKDEVIRWLVDGNVFHQIRGSDIGDQGIWGTLVHSPMFIILNVAVGGNWPGAPNSLTADGYGSMMEVEYVAVYTSS

SEQ ID NO: 73 - DNA, 2535 bp, Myceliophthora thermophilia
  CDS (1)...(2535)
atgtcggcgccgttgcacttccggggcttaccgcggaggggccgcatcctcgcgcttgccctgttctgcgtctgcctcatccttatgttcccagagtttaacctggctgttggggagatcaggctgccgtttctccggtccaggcccaactacgacgtcttggacttcgtcaaccccctaatcggcaccgccaacggaggccatgtcttccccggcgccacgctaccttatggaatggccaaacccgtagccgacaccttctcgccggccgagaacgccgccggctacgtctccgacgccaacccgatcatgggcttctcccacatgcacgactccggcaccggtggcctaccctcgttgggcaacttcccgctctttgtccacccgggctgccccgacgacgacttccgccgctgcgcctactcggtcatcacccggcccacgagccgcgtgcccggctccgcgatggccgcgccgggctacttcgccgtcaacctgaccaactcggtgcgggccgagatgacggccacccagcacgccgcgctgtaccggtttgggttctccggcaaggaccgggtcgacgtggtgcgtgatcccgaggggaggccggaggcggtggaaaggggcgtgccgtactcgcccctggtgctggtggacctggtcgacctgatgaacagccggagcctgggagccatccaggtgtttcccgaaagcgggaggatcatgggagaggggaggtacgtgccctcgtttgggacgggcaagtacgatgcgttcttctgtgccgacttcaggggcgccgccatacgcaggacgggcacgttcacgtcgaacaacgcgactgaggagcccaagttcctggacggggtccgcgccgggttccatatccccagcgggtcggcgggcgcctggctgcagtttgagcggccggcgaataactcgctgctggcgagggtcggcgtgtcgttcatatccatggaccaggcgtgccagaacgccgagagcgagatgggcgactggcatttcgagagagtggagagcgatgcgaggaagcagtggcgagagaagttgggcgccatcgagatcgacgccaccggggtgagcgaggagctgcagacgaccttctggtcagggctgtatcgcaccctgctgtcgccgcagaactacaccggggagaacccgttgtggaactcgacggagccgtatttcgactcgttctactgcatctgggactccttccgcgctcagcatcccttgctgaccatcatcgacccggtcgcgcagacggatatggtgcgtgcactgattgatatctaccggcacgaaggaaaactgcccgactgtcggatgagtttctgcaagggttacacccagggaggctccaatgccgacgtggtcattgtagacgcattcgtaaagaacttgacagaaggaatagactgggacaccgcttacgaagccgtcgtctctgatgccgaagtcgaaccgcccaactggggactggagggacgcggcaaccttgtgagctggcacaagcttggctacatcccctgggacgacaccgaccggaacggcacaggcccaatgagccgcaccatcagccggggcgtcgagtacgcctacgaggacttctgcatcgccacgctagctcaaggccttggccacgcggccgacgccgccaaataccgccgccgcggcggcaactggcgcaactactggaacccacaccagcgcgacatcttcaaggacccccacggcgccacggtccagaccgacttcgtgggcttcatgcagccgcgcctcgttaacggctccttccgctaccagaacacgcgcgcctgctcgcccgtgcaggacatgcacggctgctactacgacacgcgcctcgacacgtacgaggggagcccctggctgtacagcttcttcgtgccgcaggacatggcgacgctcatccggctcatgggcgggcccgacgccttcgtcgagcgcctgcgctacttccacaccagcggtatcgcctacctgggtaacgagcccggcttcctgcccgtcttccagttccactacgccggccggcccgccctgagcactcactttgcgcgcgagtccatccccgccctgttcaacgcctccgtcaacgggatcccgggcaacgacgactgcgccatgggcgccttcagcgcctttgccatgatgggcttcttccccgtcgccggccaggacgtctacctgctgacgacgcccttcttccccgaggtgagaatccgcgccagggcggaggggaagtgggcggtcatcaaggtcaggcgcttcgaccccgcgggcaagagaaagttcatccaacgagcgaggctcaacggcaaggcgtacacgaagagttggatcacgcacgacttcttcctgaggggcggaaccttggagttctgggtcggcgaggaggaagggacttgggggaccaaggaagcagatctaccgccgagttggcctgttgagtgggatgaaaaggatggggttggattaggcgacggatattaa

SEQ ID NO: 74 - protein, 844 aa, Myceliophthora thermophilia
MSAPLHFRGLPRRGRILALALFCVCLILMFPEFNLAVGEIRLPFLRSRPNYDVLDFVNPLIGTANGGHVFPGATLPYGMAKPVADTFSPAENAAGYVSDANPIMGFSHMHDSGTGGLPSLGNFPLFVHPGCPDDDFRRCAYSVITRPTSRVPGSAMAAPGYFAVNLTNSVRAEMTATQHAALYRFGFSGKDRVDVVRDPEGRPEAVERGVPYSPLVLVDLVDLMNSRSLGAIQVFPESGRIMGEGRYVPSFGTGKYDAFFCADFRGAAIRRTGTFTSNNATEEPKFLDGVRAGFHIPSGSAGAWLQFERPANNSLLARVGVSFISMDQACQNAESEMGDWHFERVESDARKQWREKLGAIEIDATGVSEELQTTFWSGLYRTLLSPQNYTGENPLWNSTEPYFDSFYCIWDSFRAQHPLLTIIDPVAQTDMVRALIDIYRHEGKLPDCRMSFCKGYTQGGSNADVVIVDAFVKNLTEGIDWDTAYEAVVSDAEVEPPNWGLEGRGNLVSWHKLGYIPWDDTDRNGTGPMSRTISRGVEYAYEDFCIATLAQGLGHAADAAKYRRRGGNWRNYWNPHQRDIFKDPHGATVQTDFVGFMQPRLVNGSFRYQNTRACSPVQDMHGCYYDTRLDTYEGSPWLYSFFVPQDMATLIRLMGGPDAFVERLRYFHTSGIAYLGNEPGFLPVFQFHYAGRPALSTHFARESIPALFNASVNGIPGNDDCAMGAFSAFAMMGFFPVAGQDVYLLTTPFFPEVRIRARAEGKWAVIKVRRFDPAGKRKFIQRARLNGKAYTKSWITHDFFLRGGTLEFWVGEEEGTWGTKEADLPPSWPVEWDEKDGVGLGDGY

SEQ ID NO: 75 - DNA, 1614 bp, Myceliophthora thermophilia
  CDS (1)...(1614)
atgccgcaggttcgaaaccccatcctccccggcttcaaccccgacccttccatcctccgggttggggatgactactacatcgccacttcaacctttgagtggtacccgggtgttcagatccaccactccatggacctcgcaaactgggaacttgtcacccgtcccctaaaccgcaagagccaactggatatgcgaggagatccggacagctgcggcatctgggctccctgcctgacgcatgacggcgacaggttctggctggtatacacggacgtcaaacgcaaggacggctcgttcaaggacgcacacaactacatcgtcagtgcgcccgccatcgagggtccctggtcggaccccttctatgtcaactcgtccgggttcgacccctcgctcttccatgacgacgacggccggaagtggttcgtcaacatgatgtgggaccaccgcagccgcccgcgaacctttgccggcatcgcgctgcaagagttcgaccccaaggccgggaagctggttgggccgcgcaagaacatttaccaaggcaccgacctgggcctcgtcgagggcccgcacttgtacaagcgcaacgggtggtactatctcctgacagcagagggcgggactggctatgagcatgcctgcaccctcgcccggtctcggaacatctggggcccgtacgaagatcacccgcagaagtacatcttgacgtctaaggaccacccgcacgcagccctgcagcgagccggccacggcgacatcgtcgacacccccgacgggcgtacctacgtcgttcacctgaccggccggcccatcacgcagttccgccgctgtgtcttggggcgcgagacggccatccaggaggcctactggggcgacgacgactggctctacgtcaagaacggccctgtgcccagcctgttcgtggacctcccggccgcccgcaacgacgacgactactgggccgagaagaggtacacgttcgaggcgggcctgcacaaggacttccagtggctgcgcacgcccgagacggaccgcatcttcaggacggacaacgggaagttgacgctcatcggccgcgagtccatcggctcctggttcgagcaggccctggtcgcccggcgccagacgcacttctcgtacgacgccgagaccgtcatcgacttcaagcctgccgacgagcgccagttcgccggcctgacggcctattactgccgctacaacttcttctacctgaccgtcacggcccactcggacggccggcgggagctgctcatcatggcctccgaggcctcctggcccctcggcgccctccggtccccttatccgggacccgtccagatccccaacgagggcaaggtccggctcgcgctcaagatcaggggcaaggagctgcagttctactacgctctcgagggcgaagagctaaaacagattgggcccgtattcgacgctagcatcgtttctgacgagtgcggcggccaccagaagcacggcagcttcacgggcgccttcgtcggcgtggctgcttccgacatcaacggtactgctgccgaggcgacctttgactactttgtgtacaagcccgtgcaccatgagagtgaccggtacgagatttaa

SEQ ID NO: 76 - protein, 537 aa, Myceliophthora thermophilia
MPQVRNPILPGFNPDPSILRVGDDYYIATSTFEWYPGVQIHHSMDLANWELVTRPLNRKSQLDMRGDPDSCGIWAPCLTHDGDRFWLVYTDVKRKDGSFKDAHNYIVSAPAIEGPWSDPFYVNSSGFDPSLFHDDDGRKWFVNMMWDHRSRPRTFAGIALQEFDPKAGKLVGPRKNIYQGTDLGLVEGPHLYKRNGWYYLLTAEGGTGYEHACTLARSRNIWGPYEDHPQKYILTSKDHPHAALQRAGHGDIVDTPDGRTYVVHLTGRPITQFRRCVLGRETAIQEAYWGDDDWLYVKNGPVPSLFVDLPAARNDDDYWAEKRYTFEAGLHKDFQWLRTPETDRIFRTDNGKLTLIGRESIGSWFEQALVARRQTHFSYDAETVIDFKPADERQFAGLTAYYCRYNFFYLTVTAHSDGRRELLIMASEASWPLGALRSPYPGPVQIPNEGKVRLALKIRGKELQFYYALEGEELKQIGPVFDASIVSDECGGHQKHGSFTGAFVGVAASDINGTAAEATFDYFVYKPVHHESDRYEI

SEQ ID NO: 77 - DNA, 2697 bp, Myceliophthora thermophilia
  CDS (1)...(2697)
atgtttcgcccaagacggcaccgcgtggtgctcatctgcgccttcgtcatcactgtgctgctctaccacgtctccaagaactcgcaatgggaccagccgagggagacgtggcgcggcaagacgagtcccaacacccatccaagacccgagcctctgcctccaccgccgcccgcacccaacccgcaccaaggtcccccgcctcacgttcccccaccgcacgatcctccgccgcgcgcttcgccattgccggatccggagcccatccggatcccgcagctgaaggaggccgacgaggagcaaggcacttacggccttcctaccgagcctgccgccgtcgtgcccgagaggaagccgcccacccaccacgacgggtatcacgatgcgcaagccgaagacgtcggggtcctggacccggcaacccctacctccgccgtcgtacactggcagaagccttacgagtggtttcccgtgcccgaggagtcgctcattccgcttcccacgggaaatcccaagcccattccgtcggtgcaggtctcgtttgcccaagagtcgcccgcggccaaggagaagcgcgagcagcgcctggccaaggtcagggccgaagccctgcacgcctggaccggctacaagaagtacgcctggaaccacgacgagctcatgcccgtctccaacaggtccagggaccctttttgcggctgggccgctacccttgtcgactctctcgataccctctggatcatgggcctgaaggacgagtttgacgaagccgtggacgccgtgagggggattgacttcaccacgacgccctaccgcgaggaaatccccgtctttgagaccatcatccgctatctgggcggtcttcttggggcgtacgacgtaacgggcaacgacccccgataccgcgtgctcttggacaaggcggtcgaacttgccgagatcctgatgggagtcttcgacacgcccaaccgcttgcccatcctcttttacaactggaagccggactacgccgagagaccgaaacgggcttccaccagcgcgagcgtggccgagctcggctccatgagtatggagttcacccgcctagctcagcttaccggccaaaacaagtattacgacgcaatcgcccgcatcaccgacgcttttgaggacctccaaaaccgcgagaacggcacggccatcccgggcatcttccccgagcgcctggacgcttctggctgcaataggaccgctccgccgccgtcatcctcctcagcgacgccggccggtggcgccgcaaccgtgcagcacggcaccgatgacctgaagcgtgcacttgcgggccaccacgaagctcagagtccggagggctccgccctgggcacgggcatcggcagcatcaccacggagttttatggtgggccccaaaagcgaacagatggtccccgtggcggagatcaaacctcgctcaacgcgaaggaactgcccccaaactgggactgcgccgctcagcccctgacgggaaccagctggggaacgggctcgtacagcatgggcggcagccaagactccacgtatgagtattttccgaagcaatatctcatgctgggtggcctcgaacccaagtaccgcaccatgcacgagaagacggtcgatgccgtcaaggagtatctgctcttccgtcccatggccgagggcgacccagacatcctcttctccgccaaggcctactcctccgacggcaccgcggacaagctgacgtacgagtgggaggtcacgcacctcacctgcttcctcggtggcatgtttggcctgggtggcaagatctttgaccgccccgaagatgtcgagattgccaagaagctcgccgacggctgcgtgtgggcgtacgaggtgatgcccgctggtgtcatgcccgagtatgcgcgcgtcctgccctgcaagagcagggacgactgtcactacgatcaagcggcgtggtacacggctctggatcccagggcggagcaacgcgaagccgagatggaggaatactacacccagctggccgagtggaaggagcaagtggagaaactcaagaaggaggacgctctgcggaagcaggccgaggagccggcacgtgaggtcgagtcgcagagtaagcctgctgcggagacggcacaatatggtgattcgggggatttccctgccgaaccaacggagaacgacaagaacaaatctcctgacggtttcaatttccgttccgacaaccaaggcatttccaacaaccagcaacccatgagaagcgacaagcttgttttccctcctgcacccatgaagccagtcacccataaagaatacgttgcgcagcggatcgagaacgagcgcatccctccgggcttcgtcaccctcaccgacaagcggtacctcctcaggcccgaggcaatcgagtccgtctggtacatgtaccgcatcacgggtgacccgtcctggcaggaaaaggggtggcgcatgttcgaggccgttatcggcgcgacccggacagaggccggccacagcgccatccgcgatgtgaccactaaggaccccggcaacgccaaagacatggaggacaacatggagagcttctggctcgccgagacgctcaagtacttttacctgctctttgagacccccgacgtaatctcgttggacaactgggtcttgaataccgaggcgcatcccttcaaacgcccaacttag

SEQ ID NO: 78 - protein, 898 aa, Myceliophthora thermophilia
MFRPRRHRVVLICAFVITVLLYHVSKNSQWDQPRETWRGKTSPNTHPRPEPLPPPPPAPNPHQGPPPHVPPPHDPPPRASPLPDPEPIRIPQLKEADEEQGTYGLPTEPAAVVPERKPPTHHDGYHDAQAEDVGVLDPATPTSAVVHWQKPYEWFPVPEESLIPLPTGNPKPIPSVQVSFAQESPAAKEKREQRLAKVRAEALHAWTGYKKYAWNHDELMPVSNRSRDPFCGWAATLVDSLDTLWIMGLKDEFDEAVDAVRGIDFTTTPYREEIPVFETIIRYLGGLLGAYDVTGNDPRYRVLLDKAVELAEILMGVFDTPNRLPILFYNWKPDYAERPKRASTSASVAELGSMSMEFTRLAQLTGQNKYYDAIARITDAFEDLQNRENGTAIPGIFPERLDASGCNRTAPPPSSSSATPAGGAATVQHGTDDLKRALAGHHEAQSPEGSALGTGIGSITTEFYGGPQKRTDGPRGGDQTSLNAKELPPNWDCAAQPLTGTSWGTGSYSMGGSQDSTYEYFPKQYLMLGGLEPKYRTMHEKTVDAVKEYLLFRPMAEGDPDILFSAKAYSSDGTADKLTYEWEVTHLTCFLGGMFGLGGKIFDRPEDVEIAKKLADGCVWAYEVMPAGVMPEYARVLPCKSRDDCHYDQAAWYTALDPRAEQREAEMEEYYTQLAEWKEQVEKLKKEDALRKQAEEPAREVESQSKPAAETAQYGDSGDFPAEPTENDKNKSPDGFNFRSDNQGISNNQQPMRSDKLVFPPAPMKPVTHKEYVAQRIENERIPPGFVTLTDKRYLLRPEAIESVWYMYRITGDPSWQEKGWRMFEAVIGATRTEAGHSAIRDVTTKDPGNAKDMEDNMESFWLAETLKYFYLLFETPDVISLDNWVLNTEAHPFKRPT

SEQ ID NO: 79 - DNA, 1257 bp, Myceliophthora thermophilia
  CDS (1)...(1257)
atggttcacgtaggattgatcctcgcgctcgtcgcctccttgccccggaccgtcgccgaaggccctcgccagcagctccaggccagcctgaaccgaacacacccggaactccctcgtctcatgctctatcaccagacgacccatgacgccactggtcggcccatctcgctcctcccgctggtcaccaagcaacacattggcctcacccacctcatcgttggcgccttccacgtccacgccaacggcacgatccatctcaacgaccatcctccttggcacccacgctactcgaccctatgggccgagacccgcatcctgcagtcgccatccaccgctggcggcagaagcggaggggtcaaggtcctgggcatggtgggcggcgcggcggcggggacctttgcggcggacacgctggacggggacggagccgccgcggccgcgttcgaggcgtcgtacgcgctcctccacgaggcggtgcgggcgcacaccctcgacggcgtcgacctcgacgtggaggagcccatgacgctgcggggcgccgcacggctggtccgccgtctgcgggcggactttggcccgcgcttcgttatctcattcgcgcccgtggccacggccttgttggggacaggggcaggggcgggagcgggaacgggaacgggaacgggccggcggggacgtggacgggggcgcggaggagcggggaacctgagcgggttcgactaccgcgcgctggagcgggcggtggggagggagattgcgttctacaacgcccagttctacaacgggttcggcgggatggcggacacgcgcctcttcgacgccatcgtcggcgaggggtgggagccggacaggatcgtcatcgggcagctgacgagccccgagaacgggggcgggttcgtggggcacgagcgatttgcgaggacaatcgagcggctgaggaggaggcacggcgagatcggcggcgtcgccgggtgggaatatttcaacgccgtcccgggcgggtcgagccggccgtgggaatgggcagagagcatgacgaggatcctccggcctcccgggacagagccggtgttgagaatcacgagggagatggcggagagcctgagccgtgcgtggatggtgagcgcagcggagggaggaggaggaggagcaggaggaggagcagggggaattagcagtgccagcgggttgggtacagcggagaaacgagttgggctggcgccgaacgtcgattacatggccatggtgaatgcatga

SEQ ID NO: 80 - protein, 418 aa, Myceliophthora thermophilia
MVHVGLILALVASLPRTVAEGPRQQLQASLNRTHPELPRLMLYHQTTHDATGRPISLLPLVTKQHIGLTHLIVGAFHVHANGTIHLNDHPPWHPRYSTLWAETRILQSPSTAGGRSGGVKVLGMVGGAAAGTFAADTLDGDGAAAAAFEASYALLHEAVRAHTLDGVDLDVEEPMTLRGAARLVRRLRADFGPRFVISFAPVATALLGTGAGAGAGTGTGTGRRGRGRGRGGAGNLSGFDYRALERAVGREIAFYNAQFYNGFGGMADTRLFDAIVGEGWEPDRIVIGQLTSPENGGGFVGHERFARTIERLRRRHGEIGGVAGWEYFNAVPGGSSRPWEWAESMTRILRPPGTEPVLRITREMAESLSRAWMVSAAEGGGGGAGGGAGGISSASGLGTAEKRVGLAPNVDYMAMVNA

SEQ ID NO: 81 - DNA, 984 bp, Myceliophthora thermophilia
  CDS (1)...(984)
atggcgcccctcatcaccaacatcttcacggccgacccgtcggcccacgtcttcgagggcaagctcttcatatacccgtcgcacgatcgcgagacggacatcaagttcaacgacgacggcgaccagtacgacatggtcgactaccacgtattcagcaccgagtcgctggacccggccgcccccgtgaccgaccacggcgtcgtgctccgggccgaagacgtcccctgggtgtccaagcagctctgggcccccgacgccgcctacaaggacggcaggtactacctctacttccccgcccgcgacaagcagggcgtcttccgcatcggcgtcgccgtcggcgaccgccccgagggccccttcacccccgacccggagcccatccgggacagctacagcatcgacccggccgtcttcgtcgacgacgacggccgggcctacatgtactttggcgggctctggggcggccagctgcagtgctaccagaagggcaacggcatcttcgaccccgagtggctggggcccagggagccctcgggcgagggcgtccgggcgctggggccgcgcgtcgcccggctggcggacgacatgcgccagttcgccagcgaggtgaaggagatttcgatcctggcgcccgagacgggcgagccgatcgcggccgacgaccacgaccgccgcttcttcgaggccgcctggatgcacaagtacgacggcaagtactacttcagctactccaccggcgacacccactacctcgtctacgccgtcggcgacagcccctacgggcccttcacctacgccggccgcatcctcgagcccgtcctcggctggaccacgcaccactccatcgtcgagttccacggccgctggtggctcttccaccacgactgcgagctcagcggcggagtcgaccacctgcgctccgtcaaggtcaaggagatcttctacgacaaggacggcaagattgtcactgaaaagcccgaatag

SEQ ID NO: 82 - protein, 327 aa, Myceliophthora thermophilia
MAPLITNIFTADPSAHVFEGKLFIYPSHDRETDIKFNDDGDQYDMVDYHVFSTESLDPAAPVTDHGVVLRAEDVPWVSKQLWAPDAAYKDGRYYLYFPARDKQGVFRIGVAVGDRPEGPFTPDPEPIRDSYSIDPAVFVDDDGRAYMYFGGLWGGQLQCYQKGNGIFDPEWLGPREPSGEGVRALGPRVARLADDMRQFASEVKEISILAPETGEPIAADDHDRRFFEAAWMHKYDGKYYFSYSTGDTHYLVYAVGDSPYGPFTYAGRILEPVLGWTTHHSIVEFHGRWWLFHHDCELSGGVDHLRSVKVKEIFYDKDGKIVTEKPE

SEQ ID NO: 83 - DNA, 810 bp, Myceliophthora thermophilia
  CDS (1)...(810)
atggtgactctcagtacactcgccagagcggtcagcattcccgcccttgccggctggaacattgtctcgaccatcacctttgatggcgaagccggcaagtcggtagaccaatccacgtgggaggtcataaccaacatccacgtcaacaacgaggttcaggagtacaccacctcgccggacaacgctcacctctccggcaacggcaccctgctcatcatcccgctcaagtccgagacgggccagtggacgtcggcccgcctcgggtccaagcagtcgttcacgcccgaggacggcaagacgacgcggtaccagtccgagctccgcttcggcgactccccccaggacaagcagcagggcatctggcccgccttctggatgctcggccagtcctcccgcgaggggacgccgtggcccgagtgcggcgagctcgacatcatggagcgcaagaacggcgagcccaccggccacggcaccccgcactgcggcaccggcgactcctgcggcgggctcaccaagagcgtgcccctggacggcaacggctggcatacctgggccatcgagatcgatcggacaaacaagaactgggcggaccagaccatctcctggttcctggacgacaacaagtataacagcatcaagggctccgatgttcaggacgaggacacctggaaggccattgcgcactcgccgatgtatttcattctgaacatcgctgtcggtggtgactggcctggaaagcccaacgaccagacagccgatggcatggacaacatgatggaggtcaagtatatcgctatatactcgaagtag

SEQ ID NO: 84 - protein, 269 aa, Myceliophthora thermophilia
MVTLSTLARAVSIPALAGWNIVSTITFDGEAGKSVDQSTWEVITNIHVNNEVQEYTTSPDNAHLSGNGTLLIIPLKSETGQWTSARLGSKQSFTPEDGKTTRYQSELRFGDSPQDKQQGIWPAFWMLGQSSREGTPWPECGELDIMERKNGEPTGHGTPHCGTGDSCGGLTKSVPLDGNGWHTWAIEIDRTNKNWADQTISWFLDDNKYNSIKGSDVQDEDTWKAIAHSPMYFILNIAVGGDWPGKPNDQTADGMDNMMEVKYIAIYSK

SEQ ID NO: 85 - DNA, 1677 bp, Myceliophthora thermophilia
  CDS (1)...(1677)
atgtggccctcatccgtccgcgcctccggcgccgcaggcgccgcgcttctggtgtggtccgccttggtcggcaatgccgccgcccaggtccataccgactgctaccccatgaatcagacgtgcccgccggaccccgccttcggcctggatgtcaacttcaatttcaacaccacaccaaatgtcgacgtttgggagacacaagtcggtcccgtcacctgggatcccgagaacggggccggcttcacgatcaccaagcaaggcgattcccccaccattcggaccaagttctactacttctggggccgcaccgaggtccacatgaaggcggccaagggcaccggcgtcatcagctccatcatgatgctcagcgacaatctggatgagatcgactgggagttctttggcggcaacaagaccaccgcccagagcaactactttgggaaaggcgtcatccccgatgtccccaacgccgtctaccaccagatccccggcagcgtgtcggacgatttccacaactacaccactgtctggaccaaggactacttggacttctacatcgacggagacaaggtccgcaccctgctgccccaggacgccaacaactcgtactactaccctcagactcccatgaggctgtccatcggcatctgggctggcggtgacccgcgcttaccccaaggcacgcgcgactgggccggcggcaccaccgactactctcagggccccttcgagatgctcgtcaagagcgctcacatcaccgacttcagcagcggcaaggagtatgtctacaccgacaggagcggctcgtgggagagcataaagattgtcgagggtaactccaccgtcaaggagatcctcgagaaaccgcctgagaagtcgctctcggagaaatgggctgacctgccgcaaggctccaagatcgccatctacgcctgcgcgtccggctttgtcggcctgttgttcttcgcgggcctcttctactgcatccgacagcggcgccgcggcgcgcgcgaggccaaggccgccgaggcccgcgccgaggccgagcgcctcgagctcgagcgctaccgcaaggccggcatcgacccggacagcttcgcctccgactcgcaagcgcacgagtacaacgccaaggagatgcgccgcgacggcttcgtcgacgacgacagctacagcgtgcacgactcgcccgccgccaaccccatgaccccggcctccccgctcgaccacaggtacgactccgcggccgccacggccctgggtgcgagcgccgccggcggtgccgctgccgccgccgccgccgcctcttcctcccccacgcgcagccccgtcgtcccccgcctcagcgaccgcgcgcagcccccccgcgtcggcaccccgggccctccttctccccggcacgccccgtcctcccccggccagggcagcgtgcgcagcccgtcgtcgccgcagcactacccggagccgccgtcccgcagccaaaccagcccccgcatcgggtcgccgggcccgcagcagatggcgcacccgcagccccagaggagcttcacgacggacgcgtaccgcgaccccgggcatgacgggcagggtggtggcgggtacaacggaggaaacggtcaggggtatgggcagcagggaggcaggggaaatgatggttactggggctatgctaggtaa

SEQ ID NO: 86 - protein, 558 aa, Myceliophthora thermophilia
MWPSSVRASGAAGAALLVWSALVGNAAAQVHTDCYPMNQTCPPDPAFGLDVNFNFNTTPNVDVWETQVGPVTWDPENGAGFTITKQGDSPTIRTKFYYFWGRTEVHMKAAKGTGVISSIMMLSDNLDEIDWEFFGGNKTTAQSNYFGKGVIPDVPNAVYHQIPGSVSDDFHNYTTVWTKDYLDFYIDGDKVRTLLPQDANNSYYYPQTPMRLSIGIWAGGDPRLPQGTRDWAGGTTDYSQGPFEMLVKSAHITDFSSGKEYVYTDRSGSWESIKIVEGNSTVKEILEKPPEKSLSEKWADLPQGSKIAIYACASGFVGLLFFAGLFYCIRQRRRGAREAKAAEARAEAERLELERYRKAGIDPDSFASDSQAHEYNAKEMRRDGFVDDDSYSVHDSPAANPMTPASPLDHRYDSAAATALGASAAGGAAAAAAAASSSPTRSPVVPRLSDRAQPPRVGTPGPPSPRHAPSSPGQGSVRSPSSPQHYPEPPSRSQTSPRIGSPGPQQMAHPQPQRSFTTDAYRDPGHDGQGGGGYNGGNGQGYGQQGGRGNDGYWGYAR

SEQ ID NO: 87 - DNA, 1281 bp, Myceliophthora thermophilia
  CDS (1)...(1281)
atggtgactccctctctgaagaaggcagctctggctgccctgtccctcttcccgctcctctccctagcttcgccggtgccagcaacagccgaagctagcgtacagacccggcagtcatcgggatacaagaacatcgtgtactttaccaactggggtatttacggccgcaactaccagccagaccagctgcccgcgtctcagctcacccacgtgctctattcctttgccaacatcaggtccaacggcgaggtattcctctccgacacgtatgcggacctagagaagcactatcccaacgactcatggaatgacgtcggaaacaacgtgtacggctgcgtcaagcagctcttcctgctcaagaaggcgaaccgccagctcaagacgctgctctccatcggcggctggacctactcggccaccttccccgcggcggccagcacagccgagagccgagccctcttcgcgtcgtcggcggtccggctcctggccgacctgggcttcgacggcctcgacatcgactgggagtacccggccaacgagcaggaggcggccaacttcgtcctcctgctcaaggcggtccgctcggccctggacgactacgcggcccagcacgcgcccggctaccacttcctcctcaccatcgcctcgccggccggcccgagcaactacgggcacctgccgctgcgcgacatcgccggcgtgatcgacttcttcaacttcatgggctacgactacgccggctcgtggagcaccgcggcgggacaccaggccaacctgtacccgaccgccgacgcgggcaggacgcccttctcgaccgacaaggccctgtccgactacgtcgccgccggcgtcgacccggccaagatcgtgctcggcatgcccatctacggccgctccttcgaggccaccgacggcctgggcaagcccttcaccggcgtcggccagggcagctgggagagcggcgtgtgggactacaaggtgctgccccgggccggcgccaccgtccagtacgacgaggaggccggcgcgacctacagctacgacccggccacgcgcgagctcatcagcttcgacacggtcgacatggtcaagaagaaggtcgactacgtcaagcagaagggcttcgccggcagcatgttctgggaggcctccgccgaccgcaccggcgaccagagcctcatcggcgccagcttcggcgccctcggcggcatcgaccagtcccagaaccagctgtcgtacccggacagcaagtatgataacctcagggccggcttcccgtga

SEQ ID NO: 88 - protein, 426 aa, Myceliophthora thermophilia
MVTPSLKKAALAALSLFPLLSLASPVPATAEASVQTRQSSGYKNIVYFTNWGIYGRNYQPDQLPASQLTHVLYSFANIRSNGEVFLSDTYADLEKHYPNDSWNDVGNNVYGCVKQLFLLKKANRQLKTLLSIGGWTYSATFPAAASTAESRALFASSAVRLLADLGFDGLDIDWEYPANEQEAANFVLLLKAVRSALDDYAAQHAPGYHFLLTIASPAGPSNYGHLPLRDIAGVIDFFNFMGYDYAGSWSTAAGHQANLYPTADAGRTPFSTDKALSDYVAAGVDPAKIVLGMPIYGRSFEATDGLGKPFTGVGQGSWESGVWDYKVLPRAGATVQYDEEAGATYSYDPATRELISFDTVDMVKKKVDYVKQKGFAGSMFWEASADRTGDQSLIGASFGALGGIDQSQNQLSYPDSKYDNLRAGFP

SEQ ID NO: 89 - DNA, 1356 bp, Myceliophthora thermophilia
  CDS (1)...(1356)
atgcgcatttcgtcggccacgctcaccgcggcgctctccagcgttgcctcggcttcgctgcaggtcgtgccaggaggaacatggaccacgccggacggcgagcacttgcaggcccatggtgcaggtttcattgaggtcaacgggacgtactacatgatcggcgaggacaagagcggcggccactcgttcaccaacgtcaactgctactcgtcgacggatcttgtccagtggacctatgtcggcgccctcctctcccagacgagctccggtgatctggggcccaaccgcgtcgtggagcggcccaaggtcatctacaacgacaagacgggcaagtacgtgctctggatgcacatggacagcagcaactacggcgaggcgagggttgccgtcgcaacgggcgactcggtgtgcggcaagtacgaatacatcaggagctttcaaccactcgggagggagagccgggatatggggcttttcaaggacgacgacggcaaggcctacttgctgaccgaagatagaaactacggcctccgcattgtcgcgctttcggatgactatctgactcccacgactgacgtcttctcctggagactcgagggggggaaccgggtcgaggccccggccatggtcaagctcggcgacacgtacttcttgttcgcctccatgatgaccggatgggaccccaacgacaaccagtacacgacatccaagagcctcggatccggttggtccgagtggaagaagtttgccgaccagggaacaaatacgtacaactcgcaaacgacttacatcctcaagacgagcgagagcagcgccatctacatgggcgacaggtgggtcaaggacaatctgatggcgagcacctacgtgtggctgcccctgagcatcagcggcaccagcgtcagcatgaagaactttgtcagctgggtgccgacgtccaacttcgcctcgtggcagaacccgccggccgagacgagctacgaggccgaggcggccacgtacggcggcaaggcgcgcaacatcgactgctccggctgctccggcaaggtcgccgccggctacatcggcggcccggacaacggcagcgtcaccttcaccggcatccgcagcgacatcgacggcctgaccaccatccgcatcaagttcctcaacggcgacagcagtccgcgctacgccaacgtccgcgtcaacggcgacgccggcaggaagatcgccttcctcactgcccgtggcgatcccgcctccagcaccttgcatgcccagctcaagaagggctccgacaacaccatagttatcgagggcatcaacggcggatggggccccgacgtcgaccgcctgatggtgccggtacagtga

SEQ ID NO: 90 - protein, 451 aa, Myceliophthora thermophilia
MRISSATLTAALSSVASASLQVVPGGTWTTPDGEHLQAHGAGFIEVNGTYYMIGEDKSGGHSFTNVNCYSSTDLVQWTYVGALLSQTSSGDLGPNRVVERPKVIYNDKTGKYVLWMHMDSSNYGEARVAVATGDSVCGKYEYIRSFQPLGRESRDMGLFKDDDGKAYLLTEDRNYGLRIVALSDDYLTPTTDVFSWRLEGGNRVEAPAMVKLGDTYFLFASMMTGWDPNDNQYTTSKSLGSGWSEWKKFADQGTNTYNSQTTYILKTSESSAIYMGDRWVKDNLMASTYVWLPLSISGTSVSMKNFVSWVPTSNFASWQNPPAETSYEAEAATYGGKARNIDCSGCSGKVAAGYIGGPDNGSVTFTGIRSDIDGLTTIRIKFLNGDSSPRYANVRVNGDAGRKIAFLTARGDPASSTLHAQLKKGSDNTIVIEGINGGWGPDVDRLMVPVQ

SEQ ID NO: 91 - DNA, 1557 bp, Myceliophthora thermophilia
  CDS (1)...(1557)
atggcgaccggcctcacgctccagacggccatcaagggcgctcccgagtctaccgccatcatcgtgcccgggaagccagccttgaccgtcacatataaggatctcgtgtcggagacggcctcgttccgggcgaagctcgcggccatcggcatcacacaaggatcgcccgtctccatcgcgattgtcaactcatatgagttcatcgtgtctttcctggccgcctcgtggcagcgggccatcgccgcccctctgaacccggcctacaagcaggacgagtttgagttctacatcgacgatgtcaagtcagccatcgtcctcgtcccaagaggcgcctaccagagcggcagcccggccgtcaaggccgcccagaagttcaacgccgccatcgccgaatgctactgggacgcggccaataaagaggtcgccctcgacgtcaaggagctcggccagctccagggcaagcccaaacagccagtcctcacgccccgaccggacgacgttgccctcgtcctccacaccagcggcaccacctcccgccccaaggtcgtgcccctctcccaccgcaacctcacccgcaccatgcacaacatccagcagacctaccagctcaccccttccgaccgcaccatgctcgtcatgcccctcttccacgtccacggccttctctgcggcctcctcgcccctctcctctcgggcggctccatgatcgtgcccacaaagttctccgcctccgacttctggcgcgacttcatcacccacaaggcaaactggtacacggccgtgcccaccatccaccagatcctcctcaagaacccggtcccctccccactcccgcccatccgcttcatccgctcctgctcctccccgctgtccccaaccgtcttccacgccctcgagaagacgttcaacgcccccgtcctcgaagcctacgccatgactgaggcagcccaccagatgacctccaacccgctcccctcggtcggccggcgcaagcccggcaccgtcgggttcggccagggcgtcgaggtcgtcatcctcgacgaggccggcaaccccgtgccccagggcaaggagggcgagatctgcatccgcggcgagaacgtcacgtccgggtacctcaacaacccgtccgccaacgcggctgccttcaccaaggacggctacttccgcaccggcgaccagggcaagaaggacgccgacggttacgtcatcatcaccggccgcatcaaggagctcatcaacaagggcggcgagaagatctcccccatcgagctcgacaacgtgctcacccgccacccgtccgtgagcgaggccgtcagctttgccattccggacgagatatacggccaggatattggcgtcgccgtcgtcttgaagcccggcgtgaggttgtctgagggggagctaaagagctgggtggccgagaagatggccaagtttaagattcccaagaaggtgtacttcaccgatgtcatgcctaaaacggccacgggcaagatccagcggcgcatcgtggccgagactatgcagaagcaggaggggcggtccaagctatga

SEQ ID NO: 92 - protein, 518 aa, Myceliophthora thermophilia
MATGLTLQTAIKGAPESTAIIVPGKPALTVTYKDLVSETASFRAKLAAIGITQGSPVSIAIVNSYEFIVSFLAASWQRAIAAPLNPAYKQDEFEFYIDDVKSAIVLVPRGAYQSGSPAVKAAQKFNAAIAECYWDAANKEVALDVKELGQLQGKPKQPVLTPRPDDVALVLHTSGTTSRPKVVPLSHRNLTRTMHNIQQTYQLTPSDRTMLVMPLFHVHGLLCGLLAPLLSGGSMIVPTKFSASDFWRDFITHKANWYTAVPTIHQILLKNPVPSPLPPIRFIRSCSSPLSPTVFHALEKTFNAPVLEAYAMTEAAHQMTSNPLPSVGRRKPGTVGFGQGVEVVILDEAGNPVPQGKEGEICIRGENVTSGYLNNPSANAAAFTKDGYFRTGDQGKKDADGYVIITGRIKELINKGGEKISPIELDNVLTRHPSVSEAVSFAIPDEIYGQDIGVAVVLKPGVRLSEGELKSWVAEKMAKFKIPKKVYFTDVMPKTATGKIQRRIVAETMQKQEGRSKL

SEQ ID NO: 93 - DNA, 1602 bp, Myceliophthora thermophilia
  CDS (1)...(1602)
atgcgtgcctcgaccgcgtccatcatttcggcctcgctcctcctggggcaggcctcggccgctcttccgcccattgtcatgaagggatccaagttcttctacgagaacggcacccagttcttcattaagggcatcgcttaccagcaggataccaccgctgccggcggtgactctaccagcaccaaagccgtcgactataaggaccctctcgccgacgaggcggcctgcaagcgtgacgtgcccctgctcaaggcgctgcacaccaacaccatccggacgtaccgcatcgacccgacggccgaccatgacgcgtgcatgaagctcctggacgaggctggcatctacgtcatcagcgacctgagcgtgccgggcgagtcgatcaaccgcaacgacccgctctgggacacggagctgtacaagcgctacaccgacgtggtcgacagcctcagcaagtacagcaacgtcatcggcttcttcgccggcaacgaggtgaccaacgagcccaacaacacgcaggcgtcggcctacgtcaaggcggccgtccgcgacgtcaaggcgtacatcaaggagaacgtggaccgctgggtgggcgtcggctacgccgccaacgacgactcgaacatccgcgccgacattgcccactacttcaactgcggcgaccaggatgaggccatcgacttctggggctacaacatctacgagtggtgcggccacaagacgctcgagacgtcgggctaccagacccagatcgacttcttcaagaactactcggtccccgtcttcttcgccgagtacggctgcaacctgcccgacggcgccgagggccgcatctgggaggagacgacggccctgtacggcaaggagatgacgcccgtcttctcgggcggcatcgtctacatgtacttcgaggaggagaacgactacggcctcgtcaagctccagggcgacacggccaagccgatgaagaactacgaggccctcgagtccgtcatcgccaaggtcaacccgacgggcacctcgatggacgcctacgagccgaccaactcgcccgccgcctgcccggatgtgtccaagaactggcaggtcaagggcggcagcctgccgcccaagcccgacgcgaccctgtgcgactgcatgtacgcctcgctgtcgtgcgtgcccgccgacgacaccagcaccaaggactacggcgacatcttcggctacatctgcggcaagttcccggacctgtgcgccggcatcagcggcaacgccaccgagggcacctacggcgcctactccatgtgcagcgccaagcagaagctcggctacgtcctggaccagtactacaaggagcagggcagcgccagcgacgcctgcggcttcgacggcaaggccaccctgcaggacgccaaggaggacgacaagtgcagcaaggcgctcgccagcgccagcgccgctaacgacgccgccacctccaccggcggcgccgacagcgagtccagcagcaacgccgccttcgccgccgggcccatgcggtccggcttcgtcctcggcgagctggccgtcggcctctacgtcctcgtcgccatggccgttggcgcgtccatggtcctcctgtaa

SEQ ID NO: 94 - protein, 533 aa, Myceliophthora thermophilia
MRASTASIISASLLLGQASAALPPIVMKGSKFFYENGTQFFIKGIAYQQDTTAAGGDSTSTKAVDYKDPLADEAACKRDVPLLKALHTNTIRTYRIDPTADHDACMKLLDEAGIYVISDLSVPGESINRNDPLWDTELYKRYTDVVDSLSKYSNVIGFFAGNEVTNEPNNTQASAYVKAAVRDVKAYIKENVDRWVGVGYAANDDSNIRADIAHYFNCGDQDEAIDFWGYNIYEWCGHKTLETSGYQTQIDFFKNYSVPVFFAEYGCNLPDGAEGRIWEETTALYGKEMTPVFSGGIVYMYFEEENDYGLVKLQGDTAKPMKNYEALESVIAKVNPTGTSMDAYEPTNSPAACPDVSKNWQVKGGSLPPKPDATLCDCMYASLSCVPADDTSTKDYGDIFGYICGKFPDLCAGISGNATEGTYGAYSMCSAKQKLGYVLDQYYKEQGSASDACGFDGKATLQDAKEDDKCSKALASASAANDAATSTGGADSESSSNAAFAAGPMRSGFVLGELAVGLYVLVAMAVGASMVLL

SEQ ID NO: 95 - DNA, 1821 bp, Myceliophthora thermophilia
  CDS (1)...(1821)
atgccggcattcggaagacgaaaaacaatcgcattcgtctccatcacactctgcatcctcttcttgtactccttccgacgactcgattcctatgacccgcgtttgtctttcgatgacggggttcgcgacgcaactagcggcccaactcgtgccccaactcgcgccccagccctaaacacgaaatggaccaaactaaagacgaagtacccagtcaaggatctgcggccgcttcccaccgggcagccgtcggcgctacccaaggtgcaggccgaatttggcccagagtccgactcggaccgtgacctgcgcctcaagaggcgcgatgccgtcaaggcatcctttcagcgctgctggaagtcgtaccgcaagcttgcctggatgagcgatgagctcaagcccgtgagcggggggcggcacgacccctttggcggatggggcgccacgctcgtcgacagcctcgacaccctctggatcatgggtctgatggacgagtttgaggaagccgtcgccgcgtcgtcaaccatcaactttgacaaggtctcctcccaggacatcaacgtattcgagaccaacatccgctacctcggcggcttcctcgccgcgtatgacctcagcggggacgtgcgactcttgaccaaggccagagaggtgggcgagatgctctatgtcgctttcgacacccccaacaggatgcccctgacgcgctggaacgcgtgggcggctggctggggcagggcccaggtggccgacgaccacgtcctgctcgccgagatcggcaccttttcgctcgagttcattcgcctgtccatgctgacaggcgacccgaaatggtacgacgcagtgcagcgcatcatcgatctgctccacaagcagcagcaaaccaccggcctgccgggtatgtggccgatcgtggtgaacgcccgtagggcagagtttaaccagcatcacgactataccctcggctccatggccgattcactgtacgaatacctccctaaaacgcatgctctcgtcggcggcctgctccccgtctatcgcgagatgtacgaggcggcgatgcacaccgccatcaagcacaacctctaccggcccatgctgcccgacgagaaggacgttctcatgtccgggctggtgacagtcaagacagaggacggcaagacgacccggcgcctgcgccctgagggtcaacacctcgtctgttatgcgggcggcatgctcgccctcggcggccggctggtcgggaacaagactcacgtggaaaaaggcgaaaagctgatggatggttgtatctggacctaccagaacatgccgctgggaatcatgcccgagaccttccagatgctgccgtgcgagtctgccgacgactgcccgtgggacgaggacaagtggcgggaagctgtgctctccaggggcggcctggatcgcaagacggatcccgacgacgccgacgaggccatcctccgcaaaggaatacccaagggcttcgtcgccatcggcgacaagcgatacatgttgcggcccgaggccatcgagagcgtcttcatcttgtaccgcatcaccggccgcaaagatctgctcgagtcggcatggaaaatgtacgaggcgatcgaggaaaacaccaggacgccgctggccaactcggccatttgggatgtcaccgccgccgaggggacgcccgagctgagcgactcgatggagagtttctggttgggcgagacgctcaagtatttctacttgatgttcagcgagcccgaactgatcagcctggatgagtacgtcttcaatacggaggcgcacccgctaaagagactgctcccctga

SEQ ID NO: 96 - protein, 606 aa, Myceliophthora thermophilia
MPAFGRRKTIAFVSITLCILFLYSFRRLDSYDPRLSFDDGVRDATSGPTRAPTRAPALNTKWTKLKTKYPVKDLRPLPTGQPSALPKVQAEFGPESDSDRDLRLKRRDAVKASFQRCWKSYRKLAWMSDELKPVSGGRHDPFGGWGATLVDSLDTLWIMGLMDEFEEAVAASSTINFDKVSSQDINVFETNIRYLGGFLAAYDLSGDVRLLTKAREVGEMLYVAFDTPNRMPLTRWNAWAAGWGRAQVADDHVLLAEIGTFSLEFIRLSMLTGDPKWYDAVQRIIDLLHKQQQTTGLPGMWPIVVNARRAEFNQHHDYTLGSMADSLYEYLPKTHALVGGLLPVYREMYEAAMHTAIKHNLYRPMLPDEKDVLMSGLVTVKTEDGKTTRRLRPEGQHLVCYAGGMLALGGRLVGNKTHVEKGEKLMDGCIWTYQNMPLGIMPETFQMLPCESADDCPWDEDKWREAVLSRGGLDRKTDPDDADEAILRKGIPKGFVAIGDKRYMLRPEAIESVFILYRITGRKDLLESAWKMYEAIEENTRTPLANSAIWDVTAAEGTPELSDSMESFWLGETLKYFYLMFSEPELISLDEYVFNTEAHPLKRLLP

SEQ ID NO: 97 - DNA, 1365 bp, Myceliophthora thermophilia
  CDS (1)...(1365)
atggtctggacacggttcgcggccgccgcccttgctggggccggcgtcgcaagcgccgcctacagcattgcgacaaccgacggcatcaagaagaccgccgcggacgtcgcttgggatcttttgcagtactatcacggaaacgagtcagggcagacgcccggaatcctgcctggtcctcccccgaatggtgattactactggtgggaggccggtgccatgtgggggaccttcatcgattattggaagttgacgggcgactcgacgtacaacgacctggtcacccaagcgatgctttttcaggttggcccagatcgggactataggccgcccaactacacggcctcgcttggcaacgacgaccaggcattctggggcatgtcggccatgactgccgccgagaacaactttcccaatccaccggccgaccagccgcagtggctcgctctcgcccaagccgtcttcaacacccaggcctcccccgaagagcacgacgatacttgcaacggcgggttgcggtggcagatctacctctccaacaacggatacgattacaagaacagcattgccaacggctgtttctttaacttgggcgcacgactagcgcgttacaccggcaacaaaacatacgccgagtgggccgagaaaacatgggactgggtgaggggcgtcggttacatggacgaccagtacaacatctacgacggagggcatgtgcagcacaattgcaccgacatcaaccgtgcccagttctcgtacaacaacgccgtctacctcctcggcgcggcgttcatgtacaattataccaacggtagcgacaagtggagagaggccatcgagggcctggccgacgccaccatcaagacgttcttccccgacggggtggcgtacgagatcgcatgcgagcagggcatgacatgcacggccgacatgctcagcttcaaggggtacctgcaccgctggttggctacggccacgcaggttgcgcccatcctgtccgagaagatcctcccggtcctcaagacgtcgaccgaggccgccgtgagcacctgcacgggcgaggccaacggtcgcacgtgtggcttccagtggagcaagcgccagtacgacggcagccacggcgccggccagcagatgaacgtcctcgctgccgtgtcgtcgctgctgatcgaccagagcccgccgccctatacgaacatgtccggcggcaccagcaagggcgatcccctggccgggacgaactcgcgcagcacgctgaacgagccgcgccagatcacgggcggagacagagccggtgccggcattcttaccattctcctcatagctgcgggagtcggcacgtttgggtggatgagcaccggggtttga

SEQ ID NO: 98 - protein, 454 aa, Myceliophthora thermophilia
MVWTRFAAAALAGAGVASAAYSIATTDGIKKTAADVAWDLLQYYHGNESGQTPGILPGPPPNGDYYWWEAGAMWGTFIDYWKLTGDSTYNDLVTQAMLFQVGPDRDYRPPNYTASLGNDDQAFWGMSAMTAAENNFPNPPADQPQWLALAQAVFNTQASPEEHDDTCNGGLRWQIYLSNNGYDYKNSIANGCFFNLGARLARYTGNKTYAEWAEKTWDWVRGVGYMDDQYNIYDGGHVQHNCTDINRAQFSYNNAVYLLGAAFMYNYTNGSDKWREAIEGLADATIKTFFPDGVAYEIACEQGMTCTADMLSFKGYLHRWLATATQVAPILSEKILPVLKTSTEAAVSTCTGEANGRTCGFQWSKRQYDGSHGAGQQMNVLAAVSSLLIDQSPPPYTNMSGGTSKGDPLAGTNSRSTLNEPRQITGGDRAGAGILTILLIAAGVGTFGWMSTGV

SEQ ID NO: 99 - DNA, 1212 bp, Myceliophthora thermophilia
  CDS (1)...(1212)
atgggcggcggacctacggacggctaccgttcggtggcatactttgtaaactgggccatctacgcccgcaagcaccggccccaggatctgcccgtcgagaggctgacccacgtgctgtacgccttcgccaacgtgcggcccgagtcgggcgaggtgtacatgacggactcgtgggccgacacggacatccactgggagggcgacagctggaacgacacgggcaccaacttgtacggctgcctgaagcagctcaacctgctcaagcgccgcaaccgcaacctcaaggtcctgctgtccatcggcggctggacgtacagtagcaacttcaggcagccggcctcgacgcccgagggtagacagaagtttgccacatcggcagtagacctgctctccaaccttggtttcgacggtctcgacatcgactgggagtacccgcagaacgcggccgaggcggccgacttcgtctcgctgctggccgaggtgcggggcgccctggacaagcacgcggccaaggtgtcggcgacgagcccgccgcacttcctgctgacggtcgccagcccggcgggcgcgcagaactacgagaagctcgacatggccggcatggaccgctacctcgacttctggaacctgatggcctacgactacgccggctcgtgggaccgcgtggccgcccaccaggccaacctgtacccctgccagacccacgccggcagctgcagccccttctcgaccgacgccgccgtgcgcgcctacatcgaccgcggcgtgccgcccggcaagatcgtcgtgggcatgcccctgtacggccgctcgttcgagaacaccgacgggctgggcaagccgttcagcggcgtgggcgagggcacgtgggagaacggcgtgcacgactacaagaagctgccgctcgagggtgctgaggtccgggtggacgagagtgccggcggtagctactgctatcatgccggccggagggtcctggtcagctacgacacggtggacatggcgagacaaaaggcccagtacatcaaggaccgcaagctcggcggcggcatgtggtgggagagctccgccgacaagggagggggagaaagcctgattacgaacgtcgtcgacgtgtttggcgggacgactgcgctggaatggcgcgagaactgcatcacatatccgttcaccaagtatgacaacctgagggagggattcccgaacaattag

SEQ ID NO: 100 - protein, 403 aa, Myceliophthora thermophilia
MGGGPTDGYRSVAYFVNWAIYARKHRPQDLPVERLTHVLYAFANVRPESGEVYMTDSWADTDIHWEGDSWNDTGTNLYGCLKQLNLLKRRNRNLKVLLSIGGWTYSSNFRQPASTPEGRQKFATSAVDLLSNLGFDGLDIDWEYPQNAAEAADFVSLLAEVRGALDKHAAKVSATSPPHFLLTVASPAGAQNYEKLDMAGMDRYLDFWNLMAYDYAGSWDRVAAHQANLYPCQTHAGSCSPFSTDAAVRAYIDRGVPPGKIVVGMPLYGRSFENTDGLGKPFSGVGEGTWENGVHDYKKLPLEGAEVRVDESAGGSYCYHAGRRVLVSYDTVDMARQKAQYIKDRKLGGGMWWESSADKGGGESLITNVVDVFGGTTALEWRENCITYPFTKYDNLREGFPNN

SEQ ID NO: 101 - DNA, 1077 bp, Myceliophthora thermophilia
  CDS (1)...(1077)
atgcctccccttccccaaccccccgccctcccccgcgtcatcacgtactaccaaacccaccacacaccgtcggggaagccgatatcggtgctgccgctcctccagcagccggggattggcattacgcacgtcatcctggccgcgatccacatcaacgaggacccggccgggctgacgctcaacgaccacccgccgtcggacccgcgcttcaccaccctctgggccgagatgcgcgtgctccaggccagcggcgtcaaggtgctcggcatgctgggcggcgcggcgccggggacctacgcccgcctcgacctcaacggcaacggcaacggcaacggcaacggcggcgacgatgacggcgcgttcgaggcctactaccggccgctggccgagctgatccgcgagcgggggctggacgggctggacctggacgtggaggagcccatgtcgctgggcggcatcgtgcggctgatcgaccggctgcgggccgactttgggcccgacttcctcatcacgctcgcgcccgtcgcctcggccctgctcgacccgctgcgcaacctgagcggcttcgactacgaggcgctcgaggtcctgcgcgggcgcgacatcgcctggtacaatgcccagttctactgcggctggggcgactgcagcaaccccgtcatgtacgagatgctgctggccaagggctggcctcccgacaagatcgtcgtcggcctgctgaccaatcccgacaacggctccggctgggtgccctggaacctcctgtccggcgtgctgcccttgctggccgggcggcacccccgcttcggcggcgtcatgggctgggagtacttcaacagtctgccggggggcaaagagaggccctgggagtgggcgcaggccatgactgccctgttgaagggaagacgcgccgttcagagcctggaggggttgcaggggagcgagaagccggcggaggagaaaaagacatccgaggtttcccccgaggcggatccagatgaggaacagccaggggaagcaccaccagtacctgccgaattcgagtaccattcggatgggggaggggaggaggagtag

SEQ ID NO: 102 - protein, 358 aa, Myceliophthora thermophilia
MPPLPQPPALPRVITYYQTHHTPSGKPISVLPLLQQPGIGITHVILAAIHINEDPAGLTLNDHPPSDPRFTTLWAEMRVLQASGVKVLGMLGGAAPGTYARLDLNGNGNGNGNGGDDDGAFEAYYRPLAELIRERGLDGLDLDVEEPMSLGGIVRLIDRLRADFGPDFLITLAPVASALLDPLRNLSGFDYEALEVLRGRDIAWYNAQFYCGWGDCSNPVMYEMLLAKGWPPDKIVVGLLTNPDNGSGWVPWNLLSGVLPLLAGRHPRFGGVMGWEYFNSLPGGKERPWEWAQAMTALLKGRRAVQSLEGLQGSEKPAEEKKTSEVSPEADPDEEQPGEAPPVPAEFEYHSDGGGEEE

SEQ ID NO: 103 - DNA, 1761 bp, Myceliophthora thermophilia
  CDS (1)...(1761)
atgacgcgacgcatcgtccgcacaatagtgcaaacctctaccgccaccatcttcaccctgattgtcatcttcttcctcgaccgcaacttccgcgtgctgcccaatgccatacacgagtacatgccgagccaccatgcgggcaccgtcatcaccgacgtcacgctgaccaagtgctcgtccctcaaccccttctcgtcgtgcaagctcgacgccgccgcctggcaccgcatcgagaaggacttgtacctgcgccgcgccacgttctcgtcggcctacctgcacgtccagcgcaagcgcgaggaggagctgacgcccgaggacaaggtcgtcgtggacgtcagcgtgggacggctgaacccggatgacgtggctgccaagagcagtacgaataacaggagagggaggaggacgagcgccgtggaggcggcggcggcggcggcggcggctgctccggaggccggggaggcgggcggtgagtatagccacgggaagatcgagggggagtgggaacagaggccgggtgggatctggatcaagcggagcaaccggcgcggcgtgagcgattccaaggatgcggtgaccggcctggacgtgctgtttggggacgatgcggtcgaggcgcggcccgggtgggagatgacggggacggcgatgctcttggatgcgggatcggggattcccgaggcccacatcacgatccggaggggcgccgaacaagagccgcacaaaccggtgccgaggatcatggagaatgggcggttcaagatcatgcaactggcggacctgcacctgagtacgggcgtgggacattgccgggacgccctgcccgaggattggaatggcgggaagtgcttggcggaccctaggacgctggacttcgtagagaagatcctggaggaggagaggccgaatctggtggtgctcagcggagaccaggtgaatggggagaccgcgccagatgcgcagacggccatcttcaagtacgcgcaactcctcatcaagcacaagatcccgtacgcttccatcttcggcaaccacgacgacgagggatccatgtcgcgtgccgcgcagatggaactcatcgaacagctcccctactctctgtccaaagccggccccgctgacgttgacggagtgggcaactactatatcgaggtgctggcccgcggcagctcgggtcactcggccatcactgtgtaccttctcgactcgcactcgtactcgcccaacgagcgcaagttcaaggggtatgactggatcaagcagagccagatcgactggttccgcaatacggcccggagcctcaagaggagccacgaggagtacacgcatcatcatatggacgtggcgttcatccatattcccattccggagtacacactgccgaacctgacgctggtgggcgagtggaaggagccgagcacagcgccggcttataattccggcttttacgacgcgctggtggaggaggggatatctatggtcagttgcgggcacgaccacgtgaacgagtactgcggcctgtcccagacggaagacgaaaagcccgccctctggatgtgctacgccggggcggccgggttcggcggctacgcgggctacggcggcttccaccgcaagatccgcatcttcgacttcaacatgaacgaggcgcgcatcacgacctggaagcgcgtcgagtacgggccggatgtggataagaggctcgaggaactgattctggtcgacgcgggcaaggtggtggcgccaatgcggcagtaa

SEQ ID NO: 104 - protein, 586 aa, Myceliophthora thermophilia
MTRRIVRTIVQTSTATIFTLIVIFFLDRNFRVLPNAIHEYMPSHHAGTVITDVTLTKCSSLNPFSSCKLDAAAWHRIEKDLYLRRATFSSAYLHVQRKREEELTPEDKVVVDVSVGRLNPDDVAAKSSTNNRRGRRTSAVEAAAAAAAAAPEAGEAGGEYSHGKIEGEWEQRPGGIWIKRSNRRGVSDSKDAVTGLDVLFGDDAVEARPGWEMTGTAMLLDAGSGIPEAHITIRRGAEQEPHKPVPRIMENGRFKIMQLADLHLSTGVGHCRDALPEDWNGGKCLADPRTLDFVEKILEEERPNLVVLSGDQVNGETAPDAQTAIFKYAQLLIKHKIPYASIFGNHDDEGSMSRAAQMELIEQLPYSLSKAGPADVDGVGNYYIEVLARGSSGHSAITVYLLDSHSYSPNERKFKGYDWIKQSQIDWFRNTARSLKRSHEEYTHHHMDVAFIHIPIPEYTLPNLTLVGEWKEPSTAPAYNSGFYDALVEEGISMVSCGHDHVNEYCGLSQTEDEKPALWMCYAGAAGFGGYAGYGGFHRKIRIFDFNMNEARITTWKRVEYGPDVDKRLEELILVDAGKVVAPMRQ

SEQ ID NO: 105 - DNA, 2052 bp, Myceliophthora thermophilia
  CDS (1)...(2052)
atggggctcttcaagtggaaaaagaaagtgaagaaagcttcaacggggggatctcaggctagggacaaatggccaccgcccgaaactcagtacgggtcgccgccgtcttgctcgtcgaccaaggcatccgtccgtgccgactggcgcctcggtgaccctgcttccgggacttccagccagcatgccgcaaagccacccatcatcgtgaaccaacaccactattactttggaaccccgcctccctcgcgcccgccggcgccgacccgcgtgtccagtacgcctatgagtaggctgaatgtcgactctgcagtagacttggccagggatgtctgccaagagacgggccagctgctcgagcacgcgctgccgacgtggcacagctacgggaaccagctggttaaccagggcaaccacctagtggaggggatatcgaaccgcgtctactgggagacccatcagtttctggacggcgtccttccgtcgtggcactgcagcagggggcagctgatccagcagagtcacgccgtcgtggacgagatagccaaccgcttcgacagcgttctgaccaagattgatcaggggggatatcgtggcaaagaacacgatatatacgcatggaaaccggcgcaagctctggctcagccggagccaccaagtccaccactcgccgacagaaacccaccaccaccaccaaagtccaagaagaagagccaaggcaaagctcactcgaaaggtcaaacgagtgccgcggcggggatcgtctcggggagcttcttctcaaaggtggactgctacgcaaactcgaggttgcccatgaacctgccacccctgaagttgtacattccaacatacccactgctgtgtctggcggcgcagtattcggagagggtctatgagccgccgagaggtcgtgcagagcgagacacgcacgtggccgccgactggcggacgggcaccaaagccatggtgatcaagtcagtccccatggacaccatgaacaccatcgtcttcgccatccgcggcacggcaacgttcatggactgggccgtaaacctcgacacgacaccgacgtctccggcgggcttcttggacgaccccgacaacctctgccacgccggctttctctcggtggcgcgcaagatggtgacgcccgtggcacgccggctccgccagctgctcgaggaagacccgtggcgggcctcatactcgctgctcatcacgggccacagcgcgggaggcgccgtggcggcgctcctgtacagccacatgctctccgagtcggacgccgccaagagcgagctcacggccgtggcgggcttcttcaagcgcatccactgcgtcaccttcggcacgccgcccatcagcctcatgcccctgaccaagccggacaactacctccgccggccacagctgaggaagagcatcttcctgagcttcgtcaacgagggcgacccggtggcgcgggccgacaaggcctacgtgaagagcctcctggagctcttcgcagcgccccggccgcgggtcgaatccgtcgtcgccactgccgacgacggcaactacacgggcgacaagaaacaccggcacgccggcgacaaaagagcagcagccagcagcagaagttaccgaaacaggccgtgtccgaccaagccgccgccgccgccgccgtcgtcgtcctgcccctgcccggcctgttcctccaagcgcaccaagcgcaccaaatccaccgatccggatcccgatcccaatcccgatcccgatccttatccggccggccccgtgtggaaggtgccgccgtgcacgctcagctgcgccggccgcatcgtggtgctgcggtcgggcgacgccaaggcgcggcggcaccagcggggaggagggcccgaggcgacgacggtggaggagcggctgcgcgagggcgtcgtggcgcaggtcgtcacggacgagcagctgcggggcgtcgtctggggggacccggtggcccacatgatgcggctgtacgcgggccgcatcgaggtgctcgccgtcggcgcggtcaccggggcgggggggtattga

SEQ ID NO: 106 - protein, 683 aa, Myceliophthora thermophilia
MGLFKWKKKVKKASTGGSQARDKWPPPETQYGSPPSCSSTKASVRADWRLGDPASGTSSQHAAKPPIIVNQHHYYFGTPPPSRPPAPTRVSSTPMSRLNVDSAVDLARDVCQETGQLLEHALPTWHSYGNQLVNQGNHLVEGISNRVYWETHQFLDGVLPSWHCSRGQLIQQSHAVVDEIANRFDSVLTKIDQGGYRGKEHDIYAWKPAQALAQPEPPSPPLADRNPPPPPKSKKKSQGKAHSKGQTSAAAGIVSGSFFSKVDCYANSRLPMNLPPLKLYIPTYPLLCLAAQYSERVYEPPRGRAERDTHVAADWRTGTKAMVIKSVPMDTMNTIVFAIRGTATFMDWAVNLDTTPTSPAGFLDDPDNLCHAGFLSVARKMVTPVARRLRQLLEEDPWRASYSLLITGHSAGGAVAALLYSHMLSESDAAKSELTAVAGFFKRIHCVTFGTPPISLMPLTKPDNYLRRPQLRKSIFLSFVNEGDPVARADKAYVKSLLELFAAPRPRVESVVATADDGNYTGDKKHRHAGDKRAAASSRSYRNRPCPTKPPPPPPSSSCPCPACSSKRTKRTKSTDPDPDPNPDPDPYPAGPVWKVPPCTLSCAGRIVVLRSGDAKARRHQRGGGPEATTVEERLREGVVAQVVTDEQLRGVVWGDPVAHMMRLYAGRIEVLAVGAVTGAGGY

SEQ ID NO: 107 - DNA, 963 bp, Myceliophthora thermophilia
  CDS (1)...(963)
atggctgctccaatgatgttggcacggcaggcactccggctctcgagtcgcgtaagatactttagctccacggctgcgcgaccagccgccgaggtcaagcgattgggtgtcgttggcgctgggcaaatgggtctcggcattgcattggtggccgctcagaaggcccaggtgccggtaacgctggtcgactcgtcacaagcttccctggacaagggactagcctttgcagagaagctcctcgccaaggacgtctccaagcagcgcatcacccaggaacaggccgacgccacccgcgccctgctccagcccaccacctccatcgacgacctctcgcccgtagacttcgtcatcgaggccgtgcccgagatccccgagctcaagtttgacatcttcgccaagctcgccgagatctgccccaagcacgccatcctggccaccaacacctcgtccatccccatcacccgcatcgccgccgccaccgcccgcggcaacccgaacgacacctccaacagctcacgcgtcgtatccacccacttcatgaacccggtccccgtccagaagggcgtcgagatcatctcgggcctccagacctcgcccgagacgctcgacacggccatcgagttctgcaagcgcatgggcaagatcccctccgtctcggccgactccccgggcttcctggccaaccgcatcctgatgccctacatcaacgaggccatcatctgcctcgagacgggcgtcggtgaccgtgactccatcgacgccatcatgaagaacggcaccaacgtgcccatggggcccctgcagctcgccgacttcatcggcctcgacacctgcctggccatcatgaaggttcttcacaccgaaacgggcgactccaagtaccgccccagcgtgcttctgcggaacatggtcgacgccggctggctgggcaagaagagcggcaggggcttctacgagtattag

SEQ ID NO: 108 - protein, 320 aa, Myceliophthora thermophilia
MAAPMMLARQALRLSSRVRYFSSTAARPAAEVKRLGVVGAGQMGLGIALVAAQKAQVPVTLVDSSQASLDKGLAFAEKLLAKDVSKQRITQEQADATRALLQPTTSIDDLSPVDFVIEAVPEIPELKFDIFAKLAEICPKHAILATNTSSIPITRIAAATARGNPNDTSNSSRVVSTHFMNPVPVQKGVEIISGLQTSPETLDTAIEFCKRMGKIPSVSADSPGFLANRILMPYINEAIICLETGVGDRDSIDAIMKNGTNVPMGPLQLADFIGLDTCLAIMKVLHTETGDSKYRPSVLLRNMVDAGWLGKKSGRGFYEY

SEQ ID NO: 109 - DNA, 1272 bp, Myceliophthora thermophilia
  CDS (1)...(1272)
atggactggttcggccgtgcaaagatcgcctttactcactctcccacgccgttgaccctgcagaggaaagatggcacggtcacggatcttctgaaggtctgcgaagctagcacgcctccctgccagctcaaccccctgctcttcaacggcgacatccagaccatgtggactgccgttcaggagcacggcccgccgatcttctaccgcaggaggatcttcgtcgcggaccacaagacgtacactggcacttttgccgttgacttcgcggtggagccccacaccgatgtcgacgagggattgccgccgaggacagcattttactcggacgaagactttgccaagatcgcctccgacgatagcagacctatgctcatcgtgctccacggtctgtctggcggctcgcatgagatctacctccggcacgccatcgcacccttggtattgaacggcgggaactgggaagtgtgcgtcgtgaactcccgaggctgcgccaacagcaaggtgacgagcggactgctgttcaacgcgagggctacctgggatatccggcaggtcgtgaagtgggccagggaaacctttcctaaccggccgctgttcgccctcggtttctcacttggtgccaacattttgaccaactatgtgggagaagaaggcgcaaactgcccccttaagggcgccattgccgtgggcaacccattcgacctagaggtggcgaacaagtcgctccagcggacatttctggggaagcaggtctactcgcgggtcatggggagcaacatgaagaagctcatcaatgcccacaaggacgccattctgaagcatacaaacctcaacttcgaccggatccaacaggtcacttacctccacgagtttgaccgcgaagtccagaccgtgacgtggggttatcccaccgagaacgcctactaccgggacgcatcatcctcggacgccgtgctcgccatcagaatcccgttccttgctatttccgctttggatgatccgattgccgtctatgacgccattcctttccaggagtttacgcaaaacccatacaccgtgctgctgaccacttcgctcggcggacatctctcgtggtttgagcttggcggtggaagatggcacgctcgtccgatttgcaactttctcaaccgcatggtcaccgagatcaatctggacgcgatcactccagacgccaacgggaccaagcttgagactcagtttgtgacagagttcaaccctgtgcgacggaagctgcaaatcctcaacaactaa

SEQ ID NO: 110 - protein, 423 aa, Myceliophthora thermophilia
MDWFGRAKIAFTHSPTPLTLQRKDGTVTDLLKVCEASTPPCQLNPLLFNGDIQTMWTAVQEHGPPIFYRRRIFVADHKTYTGTFAVDFAVEPHTDVDEGLPPRTAFYSDEDFAKIASDDSRPMLIVLHGLSGGSHEIYLRHAIAPLVLNGGNWEVCVVNSRGCANSKVTSGLLFNARATWDIRQVVKWARETFPNRPLFALGFSLGANILTNYVGEEGANCPLKGAIAVGNPFDLEVANKSLQRTFLGKQVYSRVMGSNMKKLINAHKDAILKHTNLNFDRIQQVTYLHEFDREVQTVTWGYPTENAYYRDASSSDAVLAIRIPFLAISALDDPIAVYDAIPFQEFTQNPYTVLLTTSLGGHLSWFELGGGRWHARPICNFLNRMVTEINLDAITPDANGTKLETQFVTEFNPVRRKLQILNN

SEQ ID NO: 111 - DNA, 1152 bp, Myceliophthora thermophilia
  CDS (1)...(1152)
atgtcgcccgaagagacgccgcttctccagaaagacggggggccggccgagttcggcccctggccgccacggctgccccagaacatcgggcaccggggctacaaggcggcgtacccggagaacaccatggcatccttccgcggggccgtggaggcgggtgctcatgccatcgaaacggatctccacctatcccgggacggcgtggtcgtgctgtcacacgaccccacgctcaagcgctgcttcggggtcgacgcccgcatcgccgactgcgactggtcgtacctgagcacccttcggacgctccagcacccgcgcgagggcatgccccggctggccgacctgctcgagtggctggccaccgctgccgcctcgtccgacctgcccgccgccgcctccgtctggctgctgctcgacatcaagactaacgacgacccggagcgcctgctccccgccgtcgcgcgcaccatcgcttcggcccccccgccgcccgggggggacatgaaagggtggaagaaaaggatcgtaattggggcgtggaatgaacactacatccgccatgctcgcctgcacctgccgggccacccactcgcctacatcggcttctcgctgctctacgcccgccgcttcctctcagacgagtactcggacgtgcacttcaacctggcccagcccaccctcgtcgggcccctgggcgccgccttccgcggggccgtccgcgcgcgtggccggcgcctgttcatctggaccgtcaacgagccccgctggatggcctgggcggtcagcaaaggcgtcgacggcgtcgtcacggacgaggtcgtgcggctgcgggccgtcttagaccggccttcttcgtcttcgtctccttcttcttcttcttcttcttcttctccttcttccgcctcttctgcttccgatatcgaggcggaggcgaatgggaacgcggaggggcttgaggttgggattggagtcgggccaggcgacggcatgcggtggccgcgcaccatccgactgtacctcgtggccatgctctggcaggtcggcgccgcgctgctgaccatcctcctgtggtaccccttgaacacgaggggtcggccaaagaagggcaggggcgcggggcagctcggcggtgcgaccttgcctgtcaaggcgtag

SEQ ID NO: 112 - protein, 383 aa, Myceliophthora thermophilia
MSPEETPLLQKDGGPAEFGPWPPRLPQNIGHRGYKAAYPENTMASFRGAVEAGAHAIETDLHLSRDGVVVLSHDPTLKRCFGVDARIADCDWSYLSTLRTLQHPREGMPRLADLLEWLATAAASSDLPAAASVWLLLDIKTNDDPERLLPAVARTIASAPPPPGGDMKGWKKRIVIGAWNEHYIRHARLHLPGHPLAYIGFSLLYARRFLSDEYSDVHFNLAQPTLVGPLGAAFRGAVRARGRRLFIWTVNEPRWMAWAVSKGVDGVVTDEVVRLRAVLDRPSSSSSPSSSSSSSSPSSASSASDIEAEANGNAEGLEVGIGVGPGDGMRWPRTIRLYLVAMLWQVGAALLTILLWYPLNTRGRPKKGRGAGQLGGATLPVKA

SEQ ID NO: 113 - DNA, 1518 bp, Myceliophthora thermophilia
  CDS (1)...(1518)
atgctgtcgcagagattaataggccgcactgcggtcaagtccgcgttcaaaccgtcagggctgccatccattgttggcgcgtcaaggtggaggcggacatatgccaccgaggctgaaacgagggatctcgtcatcatcggcggcggcgtcgccggctacgtcgccgccatcaaagctggccaggagggcatgaaggttacatgtattgagaagcgcgggaccctcggcggtacctgcctcaacgtgggctgcatcccatcaaaatcgctccttaacaattcgcacttgtaccaccagattctccacgactcgaagcatcgcggcatcgaggtcggcgacgtcaagctcaacctgaagcagctgatgaaggcgaaggagcagtcagtcgcaggcctgaccaagggtgtcgagttcctgttcaagaagaacggcgtcgagtacctgaagggtacggggtcgttccaggatgagcacacgatcaaggttcagctcaacgatggcggcgagacgagcgtgacgggcaaaaacattcttatcgcgaccggtagcgaggctacccccttccccggcctcgagattgacgagaagagggtgattaccagcaccggtgccattgcccttgaggaggttcccaagaagttggcggtcattggcggcggcatcattggtctcgagatggcgtctgtgtggtctcgcctcggatctgaggtcaccgtggttgagttcctcgatcagattggcggtcccggcatggactccgagattgcgaagagcatccagaagatcctgaagaagcagggtatcaacttcaagacgggcaccaaggttgtcagtggcgacaagagcagcgaaggcgttaagctgaacatcgactcagccaagggtggcaagccggagacgctcgacgctgacgttgtcctggtcgcgatcggccgtcgcccgtatacccaagggcttggcttggagaacattggccttgagctcgacgagcgcggccgtgtgatcatcgactcggagtaccgcaccaagatcccacacatccgctgcgtcggcgacgtcaccttcggccccatgctcgcgcacaaggctgaagaggaagctgttgctgccgtcgagtacatcaagaagggctacggccacgtcaactacggctgcatcccatccgtcatgtacaccttccccgaggtcgcgtgggttggccagtcggagcaagacctcaagaaggcgggcgtcaactaccgcgtcggtaccttccccttcagtgccaactcgcgcgccaagaccaacctggacacggaaggcatggtcaagatgcttgccgatgctgagacggaccggctgcttggcatccatatcatcggccccaatgccggcgagatgattgccgaaggtacgctggcgctcgagtacggcgcgtcgagcgaggatatcgcgcgcacttgccacgcgcaccccaccctcgccgaggctttcaaggaggcggccatggcgacgtactcaaagccgatccatttctaa

SEQ ID NO: 114 - protein, 505 aa, Myceliophthora thermophilia
MLSQRLIGRTAVKSAFKPSGLPSIVGASRWRRTYATEAETRDLVIIGGGVAGYVAAIKAGQEGMKVTCIEKRGTLGGTCLNVGCIPSKSLLNNSHLYHQILHDSKHRGIEVGDVKLNLKQLMKAKEQSVAGLTKGVEFLFKKNGVEYLKGTGSFQDEHTIKVQLNDGGETSVTGKNILIATGSEATPFPGLEIDEKRVITSTGAIALEEVPKKLAVIGGGIIGLEMASVWSRLGSEVTVVEFLDQIGGPGMDSEIAKSIQKILKKQGINFKTGTKVVSGDKSSEGVKLNIDSAKGGKPETLDADVVLVAIGRRPYTQGLGLENIGLELDERGRVIIDSEYRTKIPHIRCVGDVTFGPMLAHKAEEEAVAAVEYIKKGYGHVNYGCIPSVMYTFPEVAWVGQSEQDLKKAGVNYRVGTFPFSANSRAKTNLDTEGMVKMLADAETDRLLGIHIIGPNAGEMIAEGTLALEYGASSEDIARTCHAHPTLAEAFKEAAMATYSKPIHF

SEQ ID NO: 115 - DNA, 1326 bp, Myceliophthora thermophilia
  CDS (1)...(1326)
atgtccaccacgtcggccccaaaaaccggcatcaaagtgatcgtggttggcgccggcttcggcggcctgacggcagccatcgagtgccaccgccagggccacgacgtgtccatctatgagaacttccccgagctcaagaccctcggtgacatcatctcgttcggggccaacgccgggcgcatcttctaccgctggtccaatggcgagattgcgcgccgcctgcgcgagctgtgcatcgacctgtcctcctacggcttccgcatccacaagtgggacaccggcgaggtggtctaccaccagccaacgcccgaacagaagcccgacgcacccgtgctcaacggccaccgcggcgaactgcacgaagtggtgttcagatacgcccgcgacgagctgaagatccccatccacctgggccaacctgtcaacgagtacttcgaggacgagaaccaggcgggcatcgtgctgaagagcggagagcgcgtcgtcgccgacctcgtcatcggcgcggacggcgtgcggtccaaggcgagggagttggtgctgggatatgtagacaagccgaagagcagcggatatgcggtgtggcgggcgtggttccccaacacagacatgatcaaagaccctcgcacacgcgagttctgcatcaacggcgacactttcaacggctggatcggcccggacgtccacttcctgttcagcaccatcaagggtggtaaggattgctgctgggtcttgacccaccgcgacgagcacgacatcgatgagtcctggtccttcccgggcaagctcgaggacgtctacaaggtcctcgagggctgggacccgacctgccgggccatcgtcgagaagacgccaagtctggtggactggaagctcgtctaccgcgatcccctgccgacctgggtgagcaagcatgcgaggatcttgctcgtcggagactcggcgcatccgttcctgcccaccagcgcccagggggcaactcaggcgatggaggacggagtgacgattgccgtgtgcctgaggagagccggtaagaacaacgtgccggctgccgttcgggtgcaccaggagattcggtatgagcgtgtccgcttggtgcagaagaccggtgagaccacgcgcgaccggtggcacaaaacagactgggaaaaggtcgccaaggaccccaagagcatcgcgttcccgcgcgaggactggatccaccagcacgatgccgagaagcacgccgaggaggtgtttgacgacatcttcaagaaggttacgcagccggaactctttgagaatgtcaagctgctgcctgtcgggcccatccccgtggcggtatga

SEQ ID NO: 116 - protein, 441 aa, Myceliophthora thermophilia
MSTTSAPKTGIKVIVVGAGFGGLTAAIECHRQGHDVSIYENFPELKTLGDIISFGANAGRIFYRWSNGEIARRLRELCIDLSSYGFRIHKWDTGEVVYHQPTPEQKPDAPVLNGHRGELHEVVFRYARDELKIPIHLGQPVNEYFEDENQAGIVLKSGERVVADLVIGADGVRSKARELVLGYVDKPKSSGYAVWRAWFPNTDMIKDPRTREFCINGDTFNGWIGPDVHFLFSTIKGGKDCCWVLTHRDEHDIDESWSFPGKLEDVYKVLEGWDPTCRAIVEKTPSLVDWKLVYRDPLPTWVSKHARILLVGDSAHPFLPTSAQGATQAMEDGVTIAVCLRRAGKNNVPAAVRVHQEIRYERVRLVQKTGETTRDRWHKTDWEKVAKDPKSIAFPREDWIHQHDAEKHAEEVFDDIFKKVTQPELFENVKLLPVGPIPVAV

SEQ ID NO: 117 - DNA, 1131 bp, Myceliophthora thermophilia
  CDS (1)...(1131)
atggctaatgcgagacctacggtcgacggcatcgccgtcgtcaacctcgcctcccccgaagagcagtcaggtgccgagagtgccgccgctgcccgcgcaaggcggctcaagaccgcccgggacgccgtcggccgcgctccgtcacgatggctgctgcgtgcctcggcggcgtggtggagatcgcttcagtatgtcgggatgacgctgcactttttggctcccgagcgaccgcccagcccttccttcagcaagaccatccggtcgacaatctccaagaccgaaggcgagttttccctgcagttctacacacccgaagggtatgagaccgcggccaagacgggaaccaagtttcctgccgtcgtcaattttcacggcggcggcttcaccattggcagtgccacggatgatgcccgcttcggccgtttcgtcctgaaagagtgcaacgccgtgtttgtcagcgtgaactaccggctcagtcccgagcacccgttccccgtggcggtggaggacgccgcagacgcgctgctgtacttgatccgctccggacccgaactgctcatcgacccatccaagctggccacctcgggcttctccgccggcgccaacctcgccatcacatcaaccctccgtctagcagaccacctcgagacgctcagacaggcgggcacccaagtgccggaccaccgcatccgcgccgtggccacgtggtaccccatcaccgactacaccgaaccacgggcgctcaagcgcgccgcctcggtccgaccagaccaaacccttcccgagacgcttacctccctcttcgacgcctgctacctgcaccccccagacctgccgctcgactcgtgctacctctcgccgagcatggccaccgacgagcacctcgcggccgccattccgcaaacggtcatcttcttcacctgcgagcacgatatgctaatgcaggaaggcgaggcgctggccaagcgcttgcgagagccccctatcagcaaggacgttcgatacaagatgatcaagggtgtggctcatgcctgggacaagtcgccggaccctacgaaaccagccgagtacagcgaagacctgtatcgagagtgctgcgggtacctgagcgaagcattcgagaagccgtga

SEQ ID NO: 118 - protein, 376 aa, Myceliophthora thermophilia
MANARPTVDGIAVVNLASPEEQSGAESAAAARARRLKTARDAVGRAPSRWLLRASAAWWRSLQYVGMTLHFLAPERPPSPSFSKTIRSTISKTEGEFSLQFYTPEGYETAAKTGTKFPAVVNFHGGGFTIGSATDDARFGRFVLKECNAVFVSVNYRLSPEHPFPVAVEDAADALLYLIRSGPELLIDPSKLATSGFSAGANLAITSTLRLADHLETLRQAGTQVPDHRIRAVATWYPITDYTEPRALKRAASVRPDQTLPETLTSLFDACYLHPPDLPLDSCYLSPSMATDEHLAAAIPQTVIFFTCEHDMLMQEGEALAKRLREPPISKDVRYKMIKGVAHAWDKSPDPTKPAEYSEDLYRECCGYLSEAFEKP

SEQ ID NO: 119 - DNA, 678 bp, Myceliophthora thermophilia
  CDS (1)...(678)
atgcgtactgccatcgccaacgtcttctccttctgcctcgtcctgttgctcggcagcttgaggggaggccacgccttcgcgacggcgccggcgccggcgctggacaagagacagagcacgtcgcggtactgcagcccgagcacgcagatctgctacctcgagtactcgtggggccccacgatccccgtcttccgcatcgccgtccccgacagcgcgtcgaccaacaccgacttccagacgctgctgcagattgtcgcgcccgcctcgctcggctgggccggcttctcctggggcggcggcatgacgctcaacccgctgacggtggcgtggcccaacggcagcggaggggcgacggtttcttcgcggtgggcaactggacggagcctccccacggtgtactcgtcggcgacgtaccgcatcatctcggccgagaccaactcgacgcactggacggtcgagacggtttgctcgggatgcagccggtggaacggcagcgcgctgagcaccacggccgtcaacacctttgcgtgggccgtcagcaagagtcccgtgtcgcagcccgccgacagctcgagcagcttccagatccacgacaatatcggcaccttcgccgcgtcgttaaacgacgccaaggtgcccaaagcgacctttgatcagtatgtgcaaggggcccagtga

SEQ ID NO: 120 - protein, 225 aa, Myceliophthora thermophilia
MRTAIANVFSFCLVLLLGSLRGGHAFATAPAPALDKRQSTSRYCSPSTQICYLEYSWGPTIPVFRIAVPDSASTNTDFQTLLQIVAPASLGWAGFSWGGGMTLNPLTVAWPNGSGGATVSSRWATGRSLPTVYSSATYRIISAETNSTHWTVETVCSGCSRWNGSALSTTAVNTFAWAVSKSPVSQPADSSSSFQIHDNIGTFAASLNDAKVPKATFDQYVQGAQ

SEQ ID NO: 121 - DNA, 840 bp, Myceliophthora thermophilia
  CDS (1)...(840)
atgatctcggttcctgctctcgctctggcccttctggccgccgtccaggtcgtcgagtctgcctcggctggctgtggcaaggcgcccccttcctcgggcaccaagtcgatgacggtcaacggcaagcagcgccagtacattctccagctgcccaacaactacgacgccaacaaggcccacagggtggtgatcgggtaccactggcgcgacggatccatgaacgacgtggccaacggcggcttctacgatctgcggtcccgggcgggcgacagcaccatcttcgttgcccccaacggcctcaatgccggatgggccaacgtgggcggcgaggacatcacctttacggaccagatcgtagacatgctcaagaacgacctctgcgtggacgagacccagttctttgctacgggctggagctatggcggtgccatgagccatagcgtggcttgttctcggccagacgtcttcaaggccgtcgcggtcatcgccggggcccagctgtccggctgcgccggcggcacgacgcccgtggcgtacctaggcatccacggagccgccgacaacgtcctgcccatcgacctcggccgccagctgcgcgacaagtggctgcagaccaacggctgcaactaccagggcgcccaggaccccgcgccgggccagcaggcccacatcaagaccacctacagctgctcccgcgcgcccgtcacctggatcggccacgggggcggccacgtccccgaccccacgggcaacaacggcgtcaagtttgcgccccaggagacctgggacttctttgatgccgccgtcggagcggccggcgcgcagagcccgatgacataa

SEQ ID NO: 122 - protein, 279 aa, Myceliophthora thermophilia
MISVPALALALLAAVQVVESASAGCGKAPPSSGTKSMTVNGKQRQYILQLPNNYDANKAHRVVIGYHWRDGSMNDVANGGFYDLRSRAGDSTIFVAPNGLNAGWANVGGEDITFTDQIVDMLKNDLCVDETQFFATGWSYGGAMSHSVACSRPDVFKAVAVIAGAQLSGCAGGTTPVAYLGIHGAADNVLPIDLGRQLRDKWLQTNGCNYQGAQDPAPGQQAHIKTTYSCSRAPVTWIGHGGGHVPDPTGNNGVKFAPQETWDFFDAAVGAAGAQSPMT

SEQ ID NO: 123 - DNA, 792 bp, Myceliophthora thermophilia
  CDS (1)...(792)
atgcgaccgtggtcgactctcctcgccgcggggcttgctgcctcgggggctcacgccactccggtcgaggccgctcggcgggcgacgccaacggtctacctcgccggcgacagcaccatggccaagacgggcaacgggcttatgggctggggcgagtacctcccgaactacatcacgctccccgtagtcaacaaggccatctccgggcggtcggcccgcagctacaccaacgaagggcgcttcgccgagatcgagtcgctggtgcggaccgacgacattgtagtgatcgagtttggccacaacgacggcgggtcgcccaactcggccaacgacaacggccgcagcgactgcccgggcacggccgacgagatttgctactcgggcaagacgggcgagatcgtctacaccttcaaccactacgtcgaggcggcggcgcggagctacatcgccaagggggcccgcgtcatcatcagcagccagacgcccaacaacatgtgggagggcggcacctacaacaacgcgccctcgcgcttcgtcggctacgccgccacggccgccaagaacgtcggcgccggcgccagctttgtcgaccacttccaggccgtcggcgccatgttcctgcgcctcggcaacgcggccaccaacggcctctacccgcaggaccacacccacaccagccccgagggcgccgacttggtcgctcaggccttcgtgcaggccgtgagcctcgatttcaacgggacaacgccgctcaaggagtatctcaagaccccggtgcctcaggtgttctaa

SEQ ID NO: 124 - protein, 263 aa, Myceliophthora thermophilia
MRPWSTLLAAGLAASGAHATPVEAARRATPTVYLAGDSTMAKTGNGLMGWGEYLPNYITLPVVNKAISGRSARSYTNEGRFAEIESLVRTDDIVVIEFGHNDGGSPNSANDNGRSDCPGTADEICYSGKTGEIVYTFNHYVEAAARSYIAKGARVIISSQTPNNMWEGGTYNNAPSRFVGYAATAAKNVGAGASFVDHFQAVGAMFLRLGNAATNGLYPQDHTHTSPEGADLVAQAFVQAVSLDFNGTTPLKEYLKTPVPQVF

SEQ ID NO: 125 - DNA, 717 bp, Myceliophthora thermophilia
  CDS (1)...(717)
atgcatgccaaaacgaaaccctcgatcgtcttcctccacggctccggcaccaacccggacatcttccgcatgcagacccgcaagctcgccgccctcctgcagcaccacttcacccttcactacctggcggcgcccctgccacgcgggcccgggccgggcgtgctgcccttcttcgagggctgcggaccctacctgacgtggatggacgactcgtccgccgaggcggagaaggagtactgggatggcagcccgctctttgagcggcttctggagcagatcaagcggctgtccgggccggaaggcggcagcgccggcgccgggcccgtcgtcgcgctggtggggttctccatgggcggcaaggtggcgatggagctgacgcgccggctggagggggagggggaccgcagaatcaagatggtgattcccgtctgcgggacggtgccgctgcagggcgggttcgatgagggcggcgcccggaacgagaccaaggagaaggggtaccgagagatcctgggccggggcccggtcaaggccaagagcatacacctcatcggcgaggacgacccgtggcggccggagagcgaggtcttggtggacttctttgacgagacggggaggagcgtgatccggttcaagggggcccaccacatgccgctggatgacgccctaaacagacaggtcgctaggatgatcttggcggcgtgcaaggatggatga

SEQ ID NO: 126 - protein, 238 aa, Myceliophthora thermophilia
MHAKTKPSIVFLHGSGTNPDIFRMQTRKLAALLQHHFTLHYLAAPLPRGPGPGVLPFFEGCGPYLTWMDDSSAEAEKEYWDGSPLFERLLEQIKRLSGPEGGSAGAGPVVALVGFSMGGKVAMELTRRLEGEGDRRIKMVIPVCGTVPLQGGFDEGGARNETKEKGYREILGRGPVKAKSIHLIGEDDPWRPESEVLVDFFDETGRSVIRFKGAHHMPLDDALNRQVARMILAACKDG

SEQ ID NO: 127 - DNA, 2487 bp, Myceliophthora thermophilia
  CDS (1)...(2487)
atgaggacctcctctcgtttaatcggtgcccttgcggcggcactcttgccgtctgcccttgcgcagaacaacgcgccggtaaccttcaccgacccggactcgggcattaccttcaacacgtggggtctcgccgaggattctccccagactaagggcggtttcacttttggtgttgctctgccctctgatgccctcacgacagacgccaaggagttcatcggttacttgaaatgcgcgaggaacgatgagagcggttggtgcggtgtctccctgggcggccccatgaccaactcgctcctcatcgcggcctggccccacgaggacaccgtctacacctctctccgcttcgccaccggctatgccatgccggatgtctaccagggggacgccgagatcacccaggtctcctcctctgtcaactcgacgcacttcagcctcatcttcaggtgcgagaactgcctgcaatggagtcaaagcggcgccaccggcggtgcctccacctcgaacggcgtgttggtcctcggctgggtccaggcattcgccgaccccggcaacccgacctgccccgaccagatcaccctcgagcagcacgacaacggcatgggtatctggggtgcccagctcaactccgacgccgccagcccgtcctacaccgagtgggccgcccaggccaccaagaccgtcacgggtgactgcggcggtcccaccgagacctctgtcgtcggtgtccccgttccgacgggcgtctcgttcgattacatcgtcgtgggcggcggtgccggtggcatccccgccgccgacaagctcagcgaggccggcaagagtgtgctgctcatcgagaagggctttgcctcgaccgccaacaccggaggcactctcggccccgagtggctcgagggccacgaccttacccgctttgacgtgccgggtctgtgcaaccagatctgggttgactccaaggggatcgcttgcgaggataccgaccagatggctggctgtgtcctcggcggcggtaccgccgtgaatgccggcctgtggttcaagccctactcgctcgactgggactacctcttccctagtggttggaagtacaaagacgtccagccggccatcaaccgcgccctctcgcgcatcccgggcaccgatgctccctcgaccgacggcaagcgctactaccaacagggcttcgacgtcctctccaagggcctggccggcggcggctggacctcggtcacggccaataacgcgccagacaagaagaaccgcaccttctcccatgcccccttcatgttcgccggcggcgagcgcaacggcccgctgggcacctacttccagaccgccaagaagcgcagcaacttcaagctctggctcaacacgtcggtcaagcgcgtcatccgccagggcggccacatcaccggcgtcgaggtcgagccgttccgcgacggcggttaccaaggcatcgtccccgtcaccaaggttacgggccgcgtcatcctctctgccggtacctttggcagtgcaaagatcctgctgaggagcggtatcggtccgaacgatcagctgcaggttgtcgcggcctcggagaaggatggccctaccatgatcagcaactcgtcctggatcaacctgcctgtcggctacaacctggatgaccacctcaacaccgacactgtcatctcccaccccgacgtcgtgttctacgacttctacgaggcgtgggacaatcccatccagtctgacaaggacagctacctcaactcgcgcacgggcatcctcgcccaagccgctcccaacattgggcctatgttctgggaagagatcaagggtgcggacggcattgttcgccagctccagtggactgcccgtgtcgagggcagcctgggtgcccccaacggcaagaccatgaccatgtcgcagtacctcggtcgtggtgccacctcgcgcggccgcatgaccatcaccccgtccctgacaactgtcgtctcggacgtgccctacctcaaggaccccaacgacaaggaggccgtcatccagggcatcatcaacctgcagaacgccctcaagaacgtcgccaacctgacctggctcttccccaactcgaccatcacgccgcgccaatacgttgacagcatggtcgtctccccgagcaaccggcgctccaaccactggatgggcaccaacaagatcggcaccgacgacgggcgcaagggcggctccgccgtcgtcgacctcaacaccaaggtctacggcaccgacaacctcttcgtcatcgacgcctccatcttccccggcgtgcccaccaccaaccccacctcgtacatcgtgacggcgtcggagcacgcctcggcccgcatcctcgccctgcccgacctcacgcccgtccccaagtacgggcagtgcggcggccgcgaatggagcggcagcttcgtctgcgccgacggctccacgtgccagatgcagaacgagtggtactcgcagtgcttgtga

SEQ ID NO: 128 - protein, 828 aa, Myceliophthora thermophilia
MRTSSRLIGALAAALLPSALAQNNAPVTFTDPDSGITFNTWGLAEDSPQTKGGFTFGVALPSDALTTDAKEFIGYLKCARNDESGWCGVSLGGPMTNSLLIAAWPHEDTVYTSLRFATGYAMPDVYQGDAEITQVSSSVNSTHFSLIFRCENCLQWSQSGATGGASTSNGVLVLGWVQAFADPGNPTCPDQITLEQHDNGMGIWGAQLNSDAASPSYTEWAAQATKTVTGDCGGPTETSVVGVPVPTGVSFDYIVVGGGAGGIPAADKLSEAGKSVLLIEKGFASTANTGGTLGPEWLEGHDLTRFDVPGLCNQIWVDSKGIACEDTDQMAGCVLGGGTAVNAGLWFKPYSLDWDYLFPSGWKYKDVQPAINRALSRIPGTDAPSTDGKRYYQQGFDVLSKGLAGGGWTSVTANNAPDKKNRTFSHAPFMFAGGERNGPLGTYFQTAKKRSNFKLWLNTSVKRVIRQGGHITGVEVEPFRDGGYQGIVPVTKVTGRVILSAGTFGSAKILLRSGIGPNDQLQVVAASEKDGPTMISNSSWINLPVGYNLDDHLNTDTVISHPDVVFYDFYEAWDNPIQSDKDSYLNSRTGILAQAAPNIGPMFWEEIKGADGIVRQLQWTARVEGSLGAPNGKTMTMSQYLGRGATSRGRMTITPSLTTVVSDVPYLKDPNDKEAVIQGIINLQNALKNVANLTWLFPNSTITPRQYVDSMVVSPSNRRSNHWMGTNKIGTDDGRKGGSAVVDLNTKVYGTDNLFVIDASIFPGVPTTNPTSYIVTASEHASARILALPDLTPVPKYGQCGGREWSGSFVCADGSTCQMQNEWYSQCL

SEQ ID NO: 129 - DNA, 2736 bp, Myceliophthora thermophilia
  CDS (1)...(2736)
atggcaaatgtccaatgccacgtcatatacgtcgaccggtccgtgtcgcgggaccggagcgtcagagcgaaccggtggaatagcgatggggatgccattcgaggggaatcggcgcacatggcggaaaatgtcaggcttctcctggacgcctttgacgaagttcatttgtgtagcaccggcgccgcttgcctggaccaatggctgagcctccaagagccctcaatggcagcgctcaaaccgacgctgttcatcctagataccccctaccaagatgagatggcccgacgagaccgctcgagatccccctcgccgtcgtctcggattgccgactccgggaatcaaggcggcgaggagctgtacggtctggcattactacgaaggatcgtatcggagtcctatgtgcggaacgtgtccaagctcgtggtcacggtacccataatcgcgcccccttactgtgaccgttctgacggccgcgatgggacgggcgagccgacggggcgagccgtggccgacagcagccaccagctttcggcagacgagcggagggcggccaacaggaggatgtggaagaagtgtctcgaggtgggcgccgcggatgtcatgacgagcccgatgaaccccaggtgtgtcagcaaccttgaagtccatgcctaccgcgcccaactggatgctgcccgtgaccaaaaggcgctggtggagctccgccggggccgcaagcgctcgtgggtcggcatctgcgaggagaagcccttctcgtacctgcgggaagccatggtgtccaagctcatgggccgcatttgtcgcataggaagcgaagccgacgaggtgacccatagcatcaagctgtccatcaccgccgagaagcaggcccaagtcacgtcggcggtgggccagtggcatttctgcgcccacgattttacagaggacgagctcctcgtggccgcctcggtcatgttcgagcacgccttgtccatgcccgagctggagccatggcggataccaacagatcagctgcaccacttcctgctcgcctgccgggccgcgtacaacaccttcgtcccctatcacaacttccgccacgtggtcgacgtcctgcaggcgacgttccactttctcgtcagcatcggctctctgccgtcttaccgctcgcccgacggttcgctgctttctcaggcctgccccaaatcgccggttgcacagctcctccggccgttcgaggctctgactctccttattaccgccattggccatgatgtcggacaccccggagtcaacaacggctttctggtcacgctgaatgcgccgctcgcccagttgtacaacgatcggtccgtcctcgaatcgtttcactgcgcggcctattcgcagattctgcggagatactggccctctgcctttggcgacagcaagatgcgccacctcatgatcagctcgatcctcgccaccgatatgggattgcactttgactacatgcagaagctgggtgatctccaggcgaaactacacgccaataacagcaccgaggactgggaagagagcgtgaagaacgagcaaagggcactaacatgcgcccttctcatcaaatgcgcggatatcagcaacgtgacgcgacgacacgatgcagccctccaatggatgcgcatcctatccgaggagttctcgcgccaggccagcatggagagcgagctagagatcaagacctcgctcatgtcggagcccaagcaagacacgttatccctgacgaccgcgcagctcaagtttatgaacttgttcgccctcccgctcttccaaggcgttgccgatatcctccctgccatgcagtactgcgtcgacgagcttcacgtgaacaaggagttgtttgacaagtgtttgcttgacgaacagaaacgccagtcgcccgcccggccggttctccgggatcacgacagtgagctctcgatcaggtcgatcaagttcacaagctcgcccgaaccagcgacggaagtgaaccccgctagaggggccatcggcagcgtgccaaaggttgtcgagcctcagacgccggatccggccgtttcccagcaagcggacttccacaggccgaactcgcaccctaagcggccgaccgacggccggatcgtgaacggcatcgtgaccagcttcccgtctgccaacgaacccagccacggcgaagatgcccgcatgaatggcgccgccagccctcgccatggccatacgcgacagaggtgcagcgaaacgacagattggggttcggcgcccaatagcggcgattgggcctcgcaagcgacgagcgcaacgacgggcaggatgccgctttcgccgagcaccaagggcaccagcattgtgagctgtgactccttcgagcggcctctcagctacagcaccagcgtgcctatccccagcgtggtggcgcccgacgagtcgacaagtacggttcctaactcggccaccaccacggggagccacacggacttcaagctggagaactaccagcctcctccgctcctgctggatgaggagaacgacgcgccccggaacggccaccagcaacataaccagtacttgaacggcggcagcgcaaaaaagaacgaccatggcggggctgagcctgcagatccgggcgccagacagctcaagaagaagccgagccgtttccggatcaacgggttgcaaaacctctttaggaaacacaagagttcgagcccgccaatgcaggcagccgataccgccggatag

SEQ ID NO: 130 - protein, 911 aa, Myceliophthora thermophilia
MANVQCHVIYVDRSVSRDRSVRANRWNSDGDAIRGESAHMAENVRLLLDAFDEVHLCSTGAACLDQWLSLQEPSMAALKPTLFILDTPYQDEMARRDRSRSPSPSSRIADSGNQGGEELYGLALLRRIVSESYVRNVSKLVVTVPIIAPPYCDRSDGRDGTGEPTGRAVADSSHQLSADERRAANRRMWKKCLEVGAADVMTSPMNPRCVSNLEVHAYRAQLDAARDQKALVELRRGRKRSWVGICEEKPFSYLREAMVSKLMGRICRIGSEADEVTHSIKLSITAEKQAQVTSAVGQWHFCAHDFTEDELLVAASVMFEHALSMPELEPWRIPTDQLHHFLLACRAAYNTFVPYHNFRHVVDVLQATFHFLVSIGSLPSYRSPDGSLLSQACPKSPVAQLLRPFEALTLLITAIGHDVGHPGVNNGFLVTLNAPLAQLYNDRSVLESFHCAAYSQILRRYWPSAFGDSKMRHLMISSILATDMGLHFDYMQKLGDLQAKLHANNSTEDWEESVKNEQRALTCALLIKCADISNVTRRHDAALQWMRILSEEFSRQASMESELEIKTSLMSEPKQDTLSLTTAQLKFMNLFALPLFQGVADILPAMQYCVDELHVNKELFDKCLLDEQKRQSPARPVLRDHDSELSIRSIKFTSSPEPATEVNPARGAIGSVPKVVEPQTPDPAVSQQADFHRPNSHPKRPTDGRIVNGIVTSFPSANEPSHGEDARMNGAASPRHGHTRQRCSETTDWGSAPNSGDWASQATSATTGRMPLSPSTKGTSIVSCDSFERPLSYSTSVPIPSVVAPDESTSTVPNSATTTGSHTDFKLENYQPPPLLLDEENDAPRNGHQQHNQYLNGGSAKKNDHGGAEPADPGARQLKKKPSRFRINGLQNLFRKHKSSSPPMQAADTAG

SEQ ID NO: 131 - DNA, 879 bp, Myceliophthora thermophilia
  CDS (1)...(879)
atggccttcgaaaccaaagccaccatcgcctccttcgggggcaagctgttcaagctctcgcaccagtccgaagagacgacgaccccgatggccgtgaacctctacctgccgccgcagagcttcgcctcggacccgccgccgcgggtgcccgtgctcttctacctctcgggcctgacgtgcacgcccgagaactgctccgagaagggcttcttccagcaccgcgcctcgcagctcggcctcgccgtcgtgtacccggacacgtccccgcgcgggctcggccacccgggcgagacggactcgtgggacttcggcgccggcgccggcttctacgtcgacgccacccgcgacccctggcgccgcggctaccgcatggagagctacgtcgcccgcgagctgccccgcgccctcttcggcgacccgcagtacggccgcttcctggacccggaccgcgtctccatcacgggccactcgatgggcggccacggcgccctgacgctctacctcaagaacccgggcctctacaagagcgtcagcgccttcgcccccatcgccaacccctcccgctgcccctggggcgagaaggccttctcgggctacctcggcccggaccgcgacgagtggaagaagcacgacgccaccgagctcatccgcgcctggaagggcggcgacctcaaggccctcgtcgacgtcggcaccgcagacaacttttacaagcagggacagctgctgcccgagaacttggagaaggccgccaaggaggccggcgtggagggcttgacagtgcggtatcacgaggggtacgatcactcgtactacttcatggcaacctttagcgatgatcatgtcaaccacgcggcaaagcacctgggtttgctttga

SEQ ID NO: 132 - protein, 292 aa, Myceliophthora thermophilia
MAFETKATIASFGGKLFKLSHQSEETTTPMAVNLYLPPQSFASDPPPRVPVLFYLSGLTCTPENCSEKGFFQHRASQLGLAVVYPDTSPRGLGHPGETDSWDFGAGAGFYVDATRDPWRRGYRMESYVARELPRALFGDPQYGRFLDPDRVSITGHSMGGHGALTLYLKNPGLYKSVSAFAPIANPSRCPWGEKAFSGYLGPDRDEWKKHDATELIRAWKGGDLKALVDVGTADNFYKQGQLLPENLEKAAKEAGVEGLTVRYHEGYDHSYYFMATFSDDHVNHAAKHLGLL

SEQ ID NO: 133 - DNA, 1068 bp, Myceliophthora thermophilia
  CDS (1)...(1068)
atggcgactgcaactcgcaccttcacccgcgccctgcgcacctcggcccggcccgccttcgccgccgctccccgggtggcattccgccaggctggccgtcgcttctactcgtcggagcctgctccgaagagcagctcgtcggcgtggatctgggctgccggtgccgccgctgccggtgccggtggctggtacttcctgaacaaccagagctcggccactccccaggtcttcaagcccaagtacgaggactaccaggccgtgtacaacgagattgcgaaccgcctcgaggagaactcggattatgacgatggcagctatggccctgtgctgctgcgtctcgcctggcacgccagcggcacctatgacaaggagaccggcaccggcggcagcaacggcgccaccatgcgcttctctccggaggccgatcacggcgccaacgccggcctgaaggctgcgcgggatttccttgagcctgtgaagcagaagttcccttggatttcttactctgatctctggatcctcgctggcgtctgcgccatccaggagatgctgggcccccagattcccttccgccccggccgccaggacaaggatgtctccgcctgcacccccgacggccgcctccctgatgccgcccagggccaggaccacctgcgcaacatcttctatcgcatgggcttcaacgaccaggagattgttgctctggctggcgcgcacgctctcggccgctgccacaccgaccgctccggctactctggcccctggaccttctcgcccaccgtcctgaccaacgactactacaagctgctgcttgacgagaagtggcagtggaagaagtggaacggccccaagcagtacgaggacaagaagaccaagtcgctcatgatgctgccggccgacatggcgctcgtccaggacaagaagttcaaggagtgggttcagaagtacgctgccgacaacgacctgttcttcagggatttcgcagccgttatcaccaagctgtttgagctcggtgtgcccttccccgagaacacggagcggtgggttttcaagcccgtcaacgcctaa

SEQ ID NO: 134 - protein, 355 aa, Myceliophthora thermophilia
MATATRTFTRALRTSARPAFAAAPRVAFRQAGRRFYSSEPAPKSSSSAWIWAAGAAAAGAGGWYFLNNQSSATPQVFKPKYEDYQAVYNEIANRLEENSDYDDGSYGPVLLRLAWHASGTYDKETGTGGSNGATMRFSPEADHGANAGLKAARDFLEPVKQKFPWISYSDLWILAGVCAIQEMLGPQIPFRPGRQDKDVSACTPDGRLPDAAQGQDHLRNIFYRMGFNDQEIVALAGAHALGRCHTDRSGYSGPWTFSPTVLTNDYYKLLLDEKWQWKKWNGPKQYEDKKTKSLMMLPADMALVQDKKFKEWVQKYAADNDLFFRDFAAVITKLFELGVPFPENTERWVFKPVNA

SEQ ID NO: 135 - DNA, 1548 bp, Myceliophthora thermophilia
  CDS (1)...(1548)
atgagcgagctgcagaagaagtgggccaaagcaaggatcaccacagccatgcacacgatggcaccgccgccatctctcaccgacttgggcgagcccgacgaggaccgatacagctcgtacagtacgggctccgtgcccaacacaccccaggacgacgactcatcgtcagcttcgtcggtgtcgtccacgggaaccgtcatcccatcgccagggagagcactctttgcccggccacaaggattcccaaaccgctcgctcgacccgatcccctggacggcgtactttgagcgcgagctgttccttccatcccccgacggctccatcacttatcacgcctacctcacctctccagcgccggccgctggcccgggcaaggtaggcgggcccttgtttgtcacccaccacggcgccggcagctcgggcctgtcatttgcggtcctcggcgccgagatcaggaagcgcttacctaccgccgggatcctctctctcgatgcaagggggcatggctcgacgacgacgactgcgactgccggtactgctgctgcggcggcgacgcagagggagggcgcgatcgaagatctttcgctctccaccctcgcgtcggacctgctggccgtcatgatgctgacgaaagctgccatgcactggccgtccttgccgccggtcatattggtgggccactcgctgggcggcgcggtcgtgaccgagttcgcctccgtcctgctcccaagcatacgatccggccttgcccccgcccctcccggtaccgccgtcaccaccaccaccactgccaccaccaccaatgccactgctgccgccgccaggacgaacctggacctcgacgtcctgggctacgcggtcctagacgtggtcgaggggtccgccatggacgccctgcagagcatgcacgcctacctcgcgacgcgccccgccggcttcgagtcgctgcgcgacgccgtcgagtggcacgtccgctcgcgcaccgtgcggaatgccgtcagcgcgcgcgcgagcgtgcccggcctgctcgtgcagacccagcaccccggtcacggccccggcggcgccggttccgccgaaggcggccacgggaccgggttgggtcaggaaggaggaggtgaaggaggaggaagggtgccaggcgtgcctgttgatgacggtagaggtggtggccgtcagggtcaaggtcagggcggcggcgggagcggaaaggccgacaagccctggcggtggcggaccgacctggcaaagacgcaacccttctgggagggctggtttacgggactgagcaagaagttcctgggcggcaggggcggcaagatgctgctgctcgccgggacggaccggttggataccgagctgacgattggccagatgcagggcaagtatgcgctgcaggtgtttcccgaggccgggcatttcatccacgaggacttgccagagaagacggccatggcgctggtggacttccacaggcggaatgacaggagcacgctggtactgccgcccaaggtatcggatctcctggctcaggggaagaaggtataa

SEQ ID NO: 136 - protein, 515 aa, Myceliophthora thermophilia
MSELQKKWAKARITTAMHTMAPPPSLTDLGEPDEDRYSSYSTGSVPNTPQDDDSSSASSVSSTGTVIPSPGRALFARPQGFPNRSLDPIPWTAYFERELFLPSPDGSITYHAYLTSPAPAAGPGKVGGPLFVTHHGAGSSGLSFAVLGAEIRKRLPTAGILSLDARGHGSTTTTATAGTAAAAATQREGAIEDLSLSTLASDLLAVMMLTKAAMHWPSLPPVILVGHSLGGAVVTEFASVLLPSIRSGLAPAPPGTAVTTTTTATTTNATAAAARTNLDLDVLGYAVLDVVEGSAMDALQSMHAYLATRPAGFESLRDAVEWHVRSRTVRNAVSARASVPGLLVQTQHPGHGPGGAGSAEGGHGTGLGQEGGGEGGGRVPGVPVDDGRGGGRQGQGQGGGGSGKADKPWRWRTDLAKTQPFWEGWFTGLSKKFLGGRGGKMLLLAGTDRLDTELTIGQMQGKYALQVFPEAGHFIHEDLPEKTAMALVDFHRRNDRSTLVLPPKVSDLLAQGKKV

SEQ ID NO: 137 - DNA, 1767 bp, Myceliophthora thermophilia
  CDS (1)...(1767)
atgaggtcgcgccgagcagcgtcgaccctgcgccatgcacaggctgccgtctccgatgccgtggcattccggagcggcgccgtcgtgaggcccgtctgctgcaatgcggcgccggccagcacccggcggttcactgcggccacgacggctgctcccgcgacaatggctctggcccctccgggcattccaatcccgaacgtgccccggagacccggcttccgccagcaattcgctcctagggcaccggcccggcggtgcctccacgggcaaccacctcggcgcagcggcgcgccctccaacccggccatccagtttccctgtctcgacgccctcgaaaaccggtcggcaaccctcgagcggcaggcgtcggcgcgctccgacaacagcggcccggagccgcattacaccgtcggcgtgaccaaggtttaccactgcaaagagcctctcctgctcgaccatggcggccacctccacgagttcgacatcgcctacgagacgtggggccagatgaactcgacccgctccaacgtgatcctcctccacaccggcctctccgcctcctcccacgcgcactcgaccgccgagaacccgcagccgggctggtgggagaagttcatcggcccgggcctggccctcgataccaacaagtacttcgtcatctgcaccaatgtcatcggcggctgctacggctcgaccggcccctccagcatcgacccgctcgacggccagcgctacgccacccgcttccccatcctgaccatccaggacatggtgcgcgcccagttccgcctgctcgaccacctcggcgtcgacgtcctgtacgccagcgtcggctccagcatgggcggcatgcagtcgctcgccgccggcgtcgagttcccctcgcgcgtcggccgcatcgtctccatctcggcctgcgcccgcagccacccgtacagcatcgcgatgcgctacgtccagcgccgcgccatcctcaacgaccccaactggaaccgcggcttctactacggccgcgtgcccccgcacgtcggcatgaagctcgcccgcgagatcgccaccatcacctaccgctccgggcccgagtgggagcagcgcttcggtcgccgccgcgccgacccctccatgcccccggccctgtgcccggacttcctcgtcgagacctacctcgaccacgccggcgagaagttctgcctcacctacgacgccaacagcctgctctacgtcagcaaggccatggaccttttcgacctcggccgcgccaaccagctcgccaccgcccaacgccgcgccgaacgcctggccgccctctcccgatccgcagacaaatctccttcctcctccccatcctcctcttccaccactggcagcagcagcagcagcagcagtaccgccggcggcgcgcccacgtgcagcctcaccctcccggacaagccctacgaggaacagccgcagccggtagccgacacgcccatgctctcggcgctgagcgccgagaccttccccccgcaccagccgcagcagccccccgccgacctggtcgccggcctcgccccgctgcgccaccaccccgtgctggtcctcggcgtggccagcgacatcctgttccccgcctggcagcagcgagaggtggccgaggcgctacgccgggccggcaacgaccgggtcgagcaccacgagctgagcgaggtccagagcctgtttgggcacgacaccttcctcctcgacgtcgagggggtcggcggtgcggtgaagaactttctgggctga

SEQ ID NO: 138 - protein, 588 aa, Myceliophthora thermophilia
MRSRRAASTLRHAQAAVSDAVAFRSGAVVRPVCCNAAPASTRRFTAATTAAPATMALAPPGIPIPNVPRRPGFRQQFAPRAPARRCLHGQPPRRSGAPSNPAIQFPCLDALENRSATLERQASARSDNSGPEPHYTVGVTKVYHCKEPLLLDHGGHLHEFDIAYETWGQMNSTRSNVILLHTGLSASSHAHSTAENPQPGWWEKFIGPGLALDTNKYFVICTNVIGGCYGSTGPSSIDPLDGQRYATRFPILTIQDMVRAQFRLLDHLGVDVLYASVGSSMGGMQSLAAGVEFPSRVGRIVSISACARSHPYSIAMRYVQRRAILNDPNWNRGFYYGRVPPHVGMKLAREIATITYRSGPEWEQRFGRRRADPSMPPALCPDFLVETYLDHAGEKFCLTYDANSLLYVSKAMDLFDLGRANQLATAQRRAERLAALSRSADKSPSSSPSSSSTTGSSSSSSSTAGGAPTCSLTLPDKPYEEQPQPVADTPMLSALSAETFPPHQPQQPPADLVAGLAPLRHHPVLVLGVASDILFPAWQQREVAEALRRAGNDRVEHHELSEVQSLFGHDTFLLDVEGVGGAVKNFLG

SEQ ID NO: 139 - DNA, 1698 bp, Myceliophthora thermophilia
  CDS (1)...(1698)
atgtaccagcctgaaccaacgtcatttctccagttgtcgaccggctttgcgatcccgcagagctttcctgactacgccttcgacgagatccagttacgcttgagtgacgggcgaggcgccactgcggcaggcgctggcggcaacacggcgagtgcactgctctacgagacccatctgttcaacgccgccaatagcgccgttgtcggccccgcaccctcggcctcgggctccttcgactttcacctcaacccgccgtcatcggcaaccaccgccgccgccgccgccgctgccaccgccgccactgtgactgtcgccgcgccgcctcacccccaatcttcgataccaatctcgctcaagatggaaacgcaccccgacgaccttgctgtccaggaggccgccgctcgggaataccagccacagctcgtgggacccctcgtcggcgaaaagacgccgagtacggtgatcatggaggaatatgccaaggccgacccgatatacatacagaagacgatggtgttgcctcaaacatacacgcattaccggcccatccaaggagatggaaactgcggctggcgggcaattggcttcggctacttcgagaccctggtcaagctgggcgacaaggcccgcatcgaagccgagaggcaacggctggaggggttgaacgccctcatcgagaacatcggccagttttcgccctatgtgttccaggacttcgtcgaggagaccttgaatctcctgcagaagatcgcaggcctgtctggccacaaggagcaggcaatgacggcgctgcaggaagccttcaacacgccagaggtctccaactcgatcgtctatcactttaggatgctggccagctcgtacctcaagggcaatcgggaggcatacggcgccttcatcaccggtgacgacgccggtgtcgacggctattgccaaaacgtgcttgagcgtcacaatgtcgagatcgaccacctaggactggtcctgctggtcaacgtgctcctgaaggacgctggattcgtgctcgaggtagcctatctcgaccggagccccgggtccgaggttaacacatatcgtttccccgaagaggccaacgggcgtcttagttcggagctgggacccatcattcaccttctctaccgcccagaccattacgacatcctgtacgctcccgaaccggtcaatctgcaggtccaccgcgtggccggcttttcgcagagctaccagatccagagcacgcccatggccatgcaaaactttggttcggtcgacatgcaaacgctatcactcatccccgggttcggtgcccccgcgacgggtctggcgcccattctggacactaccccgtccccgctcagcacatacagcccaagccctgtgtcaccatggccctatgtggacacattacagcaagcaaccccggcaccgttgccagtcccaactccggcgccggcaccaacaccggccccggcgcagcagacgcacccgctacggttcagcgagtactgccagcttcgcgagtacgtcgacaacaacacgtggcgggagccggcgctgcagaccacgacattcaaaaatagccatttcaatgtggcgcactacaacaatcccaacttccagccggaagagtacaagccaggagccgacgaccacgatacgccgccgcgggtcagcggccgcaagcgaggcagtgtataa

SEQ ID NO: 140 - protein, 565 aa, Myceliophthora thermophilia
MYQPEPTSFLQLSTGFAIPQSFPDYAFDEIQLRLSDGRGATAAGAGGNTASALLYETHLFNAANSAVVGPAPSASGSFDFHLNPPSSATTAAAAAAATAATVTVAAPPHPQSSIPISLKMETHPDDLAVQEAAAREYQPQLVGPLVGEKTPSTVIMEEYAKADPIYIQKTMVLPQTYTHYRPIQGDGNCGWRAIGFGYFETLVKLGDKARIEAERQRLEGLNALIENIGQFSPYVFQDFVEETLNLLQKIAGLSGHKEQAMTALQEAFNTPEVSNSIVYHFRMLASSYLKGNREAYGAFITGDDAGVDGYCQNVLERHNVEIDHLGLVLLVNVLLKDAGFVLEVAYLDRSPGSEVNTYRFPEEANGRLSSELGPIIHLLYRPDHYDILYAPEPVNLQVHRVAGFSQSYQIQSTPMAMQNFGSVDMQTLSLIPGFGAPATGLAPILDTTPSPLSTYSPSPVSPWPYVDTLQQATPAPLPVPTPAPAPTPAPAQQTHPLRFSEYCQLREYVDNNTWREPALQTTTFKNSHFNVAHYNNPNFQPEEYKPGADDHDTPPRVSGRKRGSV

SEQ ID NO: 141 - DNA, 2034 bp, Myceliophthora thermophilia
  CDS (1)...(2034)
atggtgtgcttcaagttccgaaaggaggagaagtcgagtttcttccgccggatgacaacctttggattcggctcgcctgttcacgggagaaatgtcatgcgagaggtgatagtcgcagcactcgcctgcaacgtcaaaaccctcattggtgtccacatatcgtcgagctttcacgagagcgtcaagaggcacgtcaggcacgtctacgacgagatccggaacgacgaccgactcttgtcgcgcgagaaactcggtgcctttctcagggagacccagggcgtcgagcagtttgacctcgattctaaggaccgccgagatatcaagttcgacgagttcttttggctttggagccagaatgaatcggcctggcgcgcagcaggagagagccgacagaaggaggtggatgccacacatccgataagtcactactttataagcagcagccacaacacttacctcgagggcaatcaactgtcctcgaggagttctgctgatgcttaccgcgcggtactgaggaacgggtgccgctgtatcgagattgatgtctggaacggggccgctccccggacgccatccaggtccccgaatccgggacataaaagacatttttcttctagctccctcccgcgcttcgccggggaaaagctcggcgccaaagtgagccggcaccacagccgcagtccgagcgccgtccagaccgctttcccgccattggatcccagggaaagtagcaccacgctggatccaaaagagctgagcgacgaccgcctcgaaaagtccagagactcgtccaggtcgaatcagggagtcgagccggtagtccaccatcacggcacaatgacctccaccgtaggttttcgggaagtctgccgggccattcgagagagtgcgtttgagaacaacccgctcccgatcattgtcagcctcgaggtaggcgcggacagggaacaacaagaggtcatggtggacatcatgaaggaggaatggggagagctgttactggataggcactttgacgcttgtgacccgactcagcggcagccccggctagaggagctgtacgaaaagatcttgatcaaagtgaagcgtctggacgacagccgggtcgtgggcgacgtggagaggggacgcagcatcacgatcccaaccctgaatggcaaaccgcccatctgcgaagccctcgccgagctcgccatctacacccacagcgagcattacgtggacgagaactcgctcagcagttgcgaatcgcccagtcacatctttagcatcaacgaaggcagtttcctgtccctggtcgaagacgagtcgaagctgcacaaggtcctcaagcacaaccgggatttcttcatgcgcatctaccccaagggcctgcgcttcgacagcagcaacccggatccgagcttctgctggcgccggggcgtgcagatggtcgccatgaactggcagaagaccgacgaccccatgatgctcaacgatgccatgtttgcgggcaccaacggctgggtcctcaaaccccccgcgctgctcggcgacggcgcgcttaccgagacatccaccaacaacagcacggccgggagtgtgtcccacaaccgcaccctcgacctgcaaatcaccgtgctcgccggccagttcttgccactccccgacgatcggaggaagagcagtgggtttggcatcacgagcgacaggaagttccggcccaaagtcaaggtggagctgcatgtcgacaagcctcaaaaatcccttacaagagagacggcggccgcgaggacggaacatcccgactggggacagaatgcgaagagtctggacttcctgggcgtgaaaggagtcatggaggagattacttttgtgagattcaaagttgctgatagctcgagcaattttggaagcgacctcgttgcctgggcttgcattcgcctagaccgccttcaacaaggataccgctgtcttgatctctatcacccggtcactcgtcggccttgcgacggcaagttgtttgtcaagatcagcaaggttttgaaggactaa

SEQ ID NO: 142 - protein, 677 aa, Myceliophthora thermophilia
MVCFKFRKEEKSSFFRRMTTFGFGSPVHGRNVMREVIVAALACNVKTLIGVHISSSFHESVKRHVRHVYDEIRNDDRLLSREKLGAFLRETQGVEQFDLDSKDRRDIKFDEFFWLWSQNESAWRAAGESRQKEVDATHPISHYFISSSHNTYLEGNQLSSRSSADAYRAVLRNGCRCIEIDVWNGAAPRTPSRSPNPGHKRHFSSSSLPRFAGEKLGAKVSRHHSRSPSAVQTAFPPLDPRESSTTLDPKELSDDRLEKSRDSSRSNQGVEPVVHHHGTMTSTVGFREVCRAIRESAFENNPLPIIVSLEVGADREQQEVMVDIMKEEWGELLLDRHFDACDPTQRQPRLEELYEKILIKVKRLDDSRVVGDVERGRSITIPTLNGKPPICEALAELAIYTHSEHYVDENSLSSCESPSHIFSINEGSFLSLVEDESKLHKVLKHNRDFFMRIYPKGLRFDSSNPDPSFCWRRGVQMVAMNWQKTDDPMMLNDAMFAGTNGWVLKPPALLGDGALTETSTNNSTAGSVSHNRTLDLQITVLAGQFLPLPDDRRKSSGFGITSDRKFRPKVKVELHVDKPQKSLTRETAAARTEHPDWGQNAKSLDFLGVKGVMEEITFVRFKVADSSSNFGSDLVAWACIRLDRLQQGYRCLDLYHPVTRRPCDGKLFVKISKVLKD

SEQ ID NO: 143 - DNA, 735 bp, Myceliophthora thermophilia
  CDS (1)...(735)
atggcgtcactcgtgcgggcgccgcccctgttgttcccggcgaccgcgcggcacaccgcgaccgtcatcttcgtccacggtttaggcgacacgggccacggctgggcgggcgccgttgagaactggcggaggcggcagcgccttgacgaggtcaagtttatccttccccatgcaccatcaattcccatcacttgcaactgggggatgaagatgccgggctggtatgatatccacactattgacggcaatgccgagtccctccgccgcaatgaggacgaggccggcatcctgcagagccaggcgtactttcacgagctcatccagaaggagatcgacgctggcatccctcccgagaggattgtgctgggcggcttcagccagggcggtgccatcagcatcttttccggcctgacctcgaaggtgaagctggcgggcatcgtggctctctcgtcatacctgctgctgagcctcaagttcagcgatctggtgcccaagccagagttcaacaaggagacgcccatcttcatgggtcatggtgattccgacaaggtagtgaacacagagctcggaaagatgtcgtacgagatgctcaagggcatgggttacaatgtaacaatgaagatctacaaggatatgggacactcggcctgcctggaggagatggatgatgtcgaggcgtttttgagggagcggttgccgccgttgggcgacaacaacgccaagtcggagctctag

SEQ ID NO: 144 - protein, 244 aa, Myceliophthora thermophilia
MASLVRAPPLLFPATARHTATVIFVHGLGDTGHGWAGAVENWRRRQRLDEVKFILPHAPSIPITCNWGMKMPGWYDIHTIDGNAESLRRNEDEAGILQSQAYFHELIQKEIDAGIPPERIVLGGFSQGGAISIFSGLTSKVKLAGIVALSSYLLLSLKFSDLVPKPEFNKETPIFMGHGDSDKVVNTELGKMSYEMLKGMGYNVTMKIYKDMGHSACLEEMDDVEAFLRERLPPLGDNNAKSEL

SEQ ID NO: 145 - DNA, 1731 bp, Myceliophthora thermophilia
  CDS (1)...(1731)
atgaagggcttcaccaccttggtcaccgccgccctcctgggccgggctgttgcggcccctccggaaccgcccacgaagattgtcgagaagagggctgcccctacggtcaccatcgcttcaggctccatcgtcggcgtgagccgccaggccaccgaggccttcaacggcatcccctttgcggaaccgccggttggcccgctgagattgaagcctcccgtcaggctcaactcatctctgggcgtctttgatgccacggggattgccccggcttgtccgcagttctttgcggactcggactcgaacgatttcctgtccagggtcatagacaccgttaccagcttgcctttcttccagaaggccctcaaggtcagcgaagactgcctgaccatcaatgtcatacggccgaagggtaccaaggctggcgacaacttacccgtcctgttctggatctttggaggaggtttcgagctaggctggagctcgatgtatgacggcggccccctggtttcgaacgccatcgacatgggcaagccatacgtgttcgtggccgtcaactaccgtgtcggcggcttcggtttcatgccgggcaaggagatcctcgcggatggctcggccaacctcggccacctcgaccagcgcatgggtctcgagtgggttgccgacaacatcgcggcgtttggcggcgaccccaacaaggtgaccatctggggcgagtcggcgggcgccatctccgtcttcaaccagatggctctctacaacggcgacaacacgtacaagggcaagcccctcttccgcggcgccatcatgaactcaggcagcatcgtccctgccgacccggtcgactgcccgaagggtcaggccgtctacgaccaagtcgtggccaaggccggctgcgccggggccagcgacaccctggattgcctccgccaggcgccttacgacaagttcctcgccgccgccaactcggtcccggccatcctgtcgtacaactcggttgccctctcgtaccttccccgtcccgacggcaaggtgatcaccaagagcccggacgtcctggtcaaggagggtaagtacgcggccgtgcccatgatcatcggtgatcaggaggacgagggcacgctcttcgccttgttccagtccaacgtcacaagcaccgacaagctcgtggagtatctcggcggtctcttcttccacggggccaccaccgagcagatcgagggtctcgtcaatacctattccacctcgatcctggcgggctcgccgttccgcagcggcatcttgaacgagatctacccgggcttcaagcggctcgccgccatcctgggcgacctcgtcttcaccctgacccgccgcgtcttcctcgaggccgccacgacggtgaaccccaacgtcccggcgtggtcgtacctggccagctacgacgagggcaccccgatcctgggcacgttccacggcagcgacctcctgcaggtcttctacggcatcctgcccaactacgcgagcaagagcatccagagctactacgccaactttgtctacaacctggaccccaacgacgcgagcggcggcaccagcgccaagagcaaggtcgccgagagctggccgcgctggaccggcacggagcgcaagctcatcaacttcttctccaaccggagcggctatctgaatgatgacttccggtccgagtcggccaactacattagctcgaacgtgggagctctttacatttga

SEQ ID NO: 146 - protein, 576 aa, Myceliophthora thermophilia
MKGFTTLVTAALLGRAVAAPPEPPTKIVEKRAAPTVTIASGSIVGVSRQATEAFNGIPFAEPPVGPLRLKPPVRLNSSLGVFDATGIAPACPQFFADSDSNDFLSRVIDTVTSLPFFQKALKVSEDCLTINVIRPKGTKAGDNLPVLFWIFGGGFELGWSSMYDGGPLVSNAIDMGKPYVFVAVNYRVGGFGFMPGKEILADGSANLGHLDQRMGLEWVADNIAAFGGDPNKVTIWGESAGAISVFNQMALYNGDNTYKGKPLFRGAIMNSGSIVPADPVDCPKGQAVYDQVVAKAGCAGASDTLDCLRQAPYDKFLAAANSVPAILSYNSVALSYLPRPDGKVITKSPDVLVKEGKYAAVPMIIGDQEDEGTLFALFQSNVTSTDKLVEYLGGLFFHGATTEQIEGLVNTYSTSILAGSPFRSGILNEIYPGFKRLAAILGDLVFTLTRRVFLEAATTVNPNVPAWSYLASYDEGTPILGTFHGSDLLQVFYGILPNYASKSIQSYYANFVYNLDPNDASGGTSAKSKVAESWPRWTGTERKLINFFSNRSGYLNDDFRSESANYISSNVGALYI

SEQ ID NO: 147 - DNA, 1872 bp, Myceliophthora thermophilia
  CDS (1)...(1872)
atgaagttcttgcggaaatccgaccggggaagtgtcttgggcagcacgctcttttccttggcgtttctgttctacagcccgccgacggcggcacaaagtccaccccccgatggagcggtctacgactatattgtcatcgggagcggaccgggcggcggcgttgtgggagccaatctcgccaaggcgggatactcggtcctgctcctcgaggcgggagacgacagccccggcgcggggttcggggtgtacacgccgaccgtgacctgggacttctacgtcaagcactatcccgagggggatccgcgagacaaccagtacagccacctgacctggctcacccccgacggccgttactgggtgggccagagcggtgcgcccgagggctcccggctcctcggcgtctattatccccgcggtgccaccctgggagggtcgtccatgatcaacgccatggtcgtctggctgccgaatgacagcgactgggactaccatgccgaggtcacgggagacgacagctggagagccgagaacatgcacaagatcttccagaagatcgaaaagaacaactacctgccccggggcacggcaaaccacgggttcgacggctggttccagacgcagatggggaccatggtgcagaccaaccggacaggcccgctgcagggcaacggcgtcatgacgacgtacgcgcaggactggaacctgacgatacccatgtcggacctcctgatccgcgaccccaacgagatcggcccggaccgcgaccagacgtcgagcatctacgggcaggtcagccaccagttcgccaacggcaaccggtacagctcgcgccactacgtgcaggacgccgtcagctctggcgccaacctgaccgtctccctgacctcgctcgcgaccaggatcctctttgacacggtgacggaacccgacagcccgcgggcgacgggggtcgagtacctctttggcaagtcgctctacaggggcgacaggcggcgggcggacggcgcgatcggggtcaaccgcacggccgtggcgcggcgcgaggtgatcgtgtccgggggcgccttcaactcgccacagctgctgctgctcagcgggatcggcaacgcgaccgagctggaggcgctggggatccccgtgatccgggacctgcccggggtgggccgcaacctgatggacaaccaggagatgcccatcgtgggcacgggaagccccggcggcggcccgggggcggtggcgggcgtggccatgtacaagacgcggcacccggcccacggggagcgcgacatgttcctcttcggcgggcccggcttcctcttccgcggcttctggcccaacgaggccgtgcacctgcccgacgagccggcccagcccgtctacggcgtcagcatggtcaaggggtcgagcgtcaacaacggcggctgggtcaaactgcggagccgggacccgaccgacacgcccgagatcaacttcaaccactacgccgtcggcgccgagtacgacctcgaggccgtcaaggacacggtcgcctggatccggtccgtctaccggcgcgtgggcatcgcgacggtcgagccgccgtgcgcccgcggccccgacgagaacggctactgcggcgaggaggacgaggcctggatccacaagcagaccttcggccaccacccgacctcgaccaacaagatcggcgccgacgacgaccccaccgccgtgctcgactccaagttccgcgtccgcggcgtccgcgccctgcgcgtcgtcgacgccagcgccttcgccaggatcccgggcgtcttccccgtcgtctccacctttatgatctcgcagaaggccagcgacgacattctggccgagctggaggccgagtcacgctga

SEQ ID NO: 148 - protein, 623 aa, Myceliophthora thermophilia
MKFLRKSDRGSVLGSTLFSLAFLFYSPPTAAQSPPPDGAVYDYIVIGSGPGGGVVGANLAKAGYSVLLLEAGDDSPGAGFGVYTPTVTWDFYVKHYPEGDPRDNQYSHLTWLTPDGRYWVGQSGAPEGSRLLGVYYPRGATLGGSSMINAMVVWLPNDSDWDYHAEVTGDDSWRAENMHKIFQKIEKNNYLPRGTANHGFDGWFQTQMGTMVQTNRTGPLQGNGVMTTYAQDWNLTIPMSDLLIRDPNEIGPDRDQTSSIYGQVSHQFANGNRYSSRHYVQDAVSSGANLTVSLTSLATRILFDTVTEPDSPRATGVEYLFGKSLYRGDRRRADGAIGVNRTAVARREVIVSGGAFNSPQLLLLSGIGNATELEALGIPVIRDLPGVGRNLMDNQEMPIVGTGSPGGGPGAVAGVAMYKTRHPAHGERDMFLFGGPGFLFRGFWPNEAVHLPDEPAQPVYGVSMVKGSSVNNGGWVKLRSRDPTDTPEINFNHYAVGAEYDLEAVKDTVAWIRSVYRRVGIATVEPPCARGPDENGYCGEEDEAWIHKQTFGHHPTSTNKIGADDDPTAVLDSKFRVRGVRALRVVDASAFARIPGVFPVVSTFMISQKASDDILAELEAESR

SEQ ID NO: 149 - DNA, 567 bp, Myceliophthora thermophilia
  CDS (1)...(567)
atggccactcaagaccaagtcgcccctactcctgcgccggcagcagaagctcaagcaccggctgccgcggccgccgccgcggccacccgatccgactctgacccttccatcttggcgcacgtcgagcactaccatgcgacgcgctgcgcggcgtcgcccatctacgcctttctcctcggcacgccggccgacaagccgctggtgcgcttcacgcatgcacgcaaggggctcttcacggcccgcttgcggctcgacgcccagcatctcaactcggccggcggcatccacgggtccgtctccgccacgctggtcgactgggccggcgggctcgccattgcagcctgggacctacgcgccgccaccggcgtgagcgtcgacatcaacatctcgtacctgtcgtcggcccggctcggcgacgagatcgagatcgagggccgcgtggagcgcgtcggctccaacctggcctttaccgaggtccgcatcttcaaggtggacgctcgcggagagaggggcgccgtggtcgcttcggggaggcacaccaagtttgtgagagacactaagaaatga

SEQ ID NO: 150 - protein, 188 aa, Myceliophthora thermophilia
MATQDQVAPTPAPAAEAQAPAAAAAAAATRSDSDPSILAHVEHYHATRCAASPIYAFLLGTPADKPLVRFTHARKGLFTARLRLDAQHLNSAGGIHGSVSATLVDWAGGLAIAAWDLRAATGVSVDINISYLSSARLGDEIEIEGRVERVGSNLAFTEVRIFKVDARGERGAVVASGRHTKFVRDTKK

SEQ ID NO: 151 - DNA, 696 bp, Myceliophthora thermophilia
  CDS (1)...(696)
atgaagtttctctcgctcctcactgctgcaggcgtcgctgccgcgctgcccacttccccggctgaggtctccagcgccggcgaaatcgaggcccgccagctagcatctacccgcaacgagctggagaacggcgactcagccaactgccccaaggccatcttcatctttgcccgagcctcgactgaacccggcaacatgggcatctcggcgggccccaacgtcgcgtccgtcctggaggccgcctacggcgacaatatctgggtgcagggggtggggggcccgtaccgggcagggctggccgacaacgcgctgccggcgggcacgacgcgggcggcgatcgacgaggcgaagcggctgttcaacctggccaacaccaagtgtccgggggcggccgtggtcgcgggcggctacagccaggggacggccgtcgtgtccaacgcgatcgcggagctgcgggggacggggacggcgacgcaggagcagatccggggcgtcgtgctcttcggctacaccaagaacctccagaacggcggccgcgtccccgactacccgaccgaccgcaccaaggtcttctgcaacgtcggcgacctcgtctgctccggcaccctcatcgttgccccggcccacttcctctacacggccgagtcgctcggcgaggccccgcgcttcctccagagcaagatcgacgccacgtag

SEQ ID NO: 152 - protein, 231 aa, Myceliophthora thermophilia
MKFLSLLTAAGVAAALPTSPAEVSSAGEIEARQLASTRNELENGDSANCPKAIFIFARASTEPGNMGISAGPNVASVLEAAYGDNIWVQGVGGPYRAGLADNALPAGTTRAAIDEAKRLFNLANTKCPGAAVVAGGYSQGTAVVSNAIAELRGTGTATQEQIRGVVLFGYTKNLQNGGRVPDYPTDRTKVFCNVGDLVCSGTLIVAPAHFLYTAESLGEAPRFLQSKIDAT

SEQ ID NO: 153 - DNA, 1953 bp, Myceliophthora thermophilia
  CDS (1)...(1953)
atgttactttcgaaactatctattctgcttgccaaatggctgtccgttgctgtgtatgccggaactcttgtccatgatgaacagttcatcccggaccatattctcagggtatccgttgcccaggtgccctcggcttgcgagaaccgggaagacgttgtcgtcaacgggacctcaccggggcctgccatacacttgcttcctggcgctaggacttggatccgtgtctacaatgacatgaatgaccggaaccttagcatgcattggcacggcctttctcagcgattcgccccgttctccgacgggacaccatccgcaacgcaatggcccataccgcccgggcacttcttcgactacgaaattctgaccgaaccagaagacgcagggacatacttctaccattcacacgtgggcatgcaggcgctgagctgcaccgggcccttgatcgtggaggactgtggatcatcaccgtaccactacgacgacgagcgaatactgctattccaagaccacttccagaagagcgatctcgaaatgattcaaggcctgacgtcaacgcagttcacgtggaccggcgagacacggggtatcttactgaacggcaggggcgtctcgccgaaccaagcagccgtccagggccgaccaggcgaagccagcggcttctttggaagccaccgtttctcaaatttccgcgcgggtgatggcacctccaactcctgggatgggatacgtggcgatgatcagatcgaacctccaactgactgcactctcccggtcatcgatgtcgagccgggcaagacttaccggctccgcttcattggtgccacaggcctgtcccttttgacgatgggtttcgaggatcacaacgatctcactattgttcaggtcgacggcagcgagtacaatgcgccggtaacggttgaccatatccagctcggcggaggtcaacgtttcgacgttcttctccgcaccaagacggccgaggagctcagatgcaacggcgacaagaccacctatttcctgcaatttgaaacccgcgatcgtcccgatccctaccgcggctatggcgtcctacggtataatctcggcactccggtccccgccgcccccacgactccggcgctcactctcccggccgaagtcaacaactggctggaatacactttccagccacttcatccttcgagcagcttgtctcccacggccgaagaggtcacccgccgcgtcattctcgaagccgagcaaaagatcgaccctgcaaccggtcgccttgtctggaagctcgcgcacatgacctggactgacatgtcacgcgacaagccggtgctagtcgacatatacgagcgcggggaggccgccatgccggactatgccgcggcgctgaccaactacggctgggatccggcaacgaagctgttccccgcgaagaaagacgaggtgctcgagattgtgatccagaacacgggatcgcactacagcggtgccagcggcatcgtcgagacgcaccccttccacgcccacggtcagcacttctacgatgtgggcagtgggcccggcaagtacgatcccgaggccaataacgccaagctggcgagcttgggataccggccaatcaagcgggacacgacaatggtgtaccggtacggcgaaggcaaggtggcgcccggcgagccggccgggtggagggcgtggaggatgaagatgaacaatcctggcgtgtggatggtgcactgtcacattctggcacacatgatcatgggcatggaaacgatctgggtggtcggagacgccgaggacatcgtcacaattccgttgtctgtgagccagaactacttcacatacggcggcagcgtctacggaaatgatacacacgccccagaggtttatcactatttcgacgacacgaacaaatgttgtgccgcgggggccggggatagtgaggattccggtcactaa

SEQ ID NO: 154 - protein, 650 aa, Myceliophthora thermophilia
MLLSKLSILLAKWLSVAVYAGTLVHDEQFIPDHILRVSVAQVPSACENREDVVVNGTSPGPAIHLLPGARTWIRVYNDMNDRNLSMHWHGLSQRFAPFSDGTPSATQWPIPPGHFFDYEILTEPEDAGTYFYHSHVGMQALSCTGPLIVEDCGSSPYHYDDERILLFQDHFQKSDLEMIQGLTSTQFTWTGETRGILLNGRGVSPNQAAVQGRPGEASGFFGSHRFSNFRAGDGTSNSWDGIRGDDQIEPPTDCTLPVIDVEPGKTYRLRFIGATGLSLLTMGFEDHNDLTIVQVDGSEYNAPVTVDHIQLGGGQRFDVLLRTKTAEELRCNGDKTTYFLQFETRDRPDPYRGYGVLRYNLGTPVPAAPTTPALTLPAEVNNWLEYTFQPLHPSSSLSPTAEEVTRRVILEAEQKIDPATGRLVWKLAHMTWTDMSRDKPVLVDIYERGEAAMPDYAAALTNYGWDPATKLFPAKKDEVLEIVIQNTGSHYSGASGIVETHPFHAHGQHFYDVGSGPGKYDPEANNAKLASLGYRPIKRDTTMVYRYGEGKVAPGEPAGWRAWRMKMNNPGVWMVHCHILAHMIMGMETIWVVGDAEDIVTIPLSVSQNYFTYGGSVYGNDTHAPEVYHYFDDTNKCCAAGAGDSEDSGH

SEQ ID NO: 155 - DNA, 639 bp, Myceliophthora thermophilia
  CDS (1)...(639)
atgcagctcatccagagtgttgcacgagtggctgccttcctgggcctcgcccggagacaattcgagcccgattcgtccccgtatgaggacccggaaaccggcctgacgttcgcctcgtacaccagcgaccgcggtatcacgttccgcgtggccattcctgatcccgtccctgaggacaaggtattcgacacgctccttcagattgtggcacccaaggagctcggctgggttggctgggcctggggcggctccatgacatacaacccgctcactgtcgtctgggcggacggggacaacgtcgtcctgtcgtcacggattgcctacggctacttcagcccgcccgagaaccctgacgcgcagtacactgtcttggagacgggaacgcacgtcaacgagacgcacttccaggtcacggccaagtgcaccggctgctcgaggtggggcgacgaagacacgggctacaccgagctcgacccggcatatcagaccaccttcgcattcgcctactcggagacgcctgtggagacccccagcgacccggcttccaactttggcatccacgacagcctgggacatccgatctacgacctggctacggcccagaatgccaactttgacgaggtggtgggagcgctttaa

SEQ ID NO: 156 - protein, 212 aa, Myceliophthora thermophilia
MQLIQSVARVAAFLGLARRQFEPDSSPYEDPETGLTFASYTSDRGITFRVAIPDPVPEDKVFDTLLQIVAPKELGWVGWAWGGSMTYNPLTVVWADGDNVVLSSRIAYGYFSPPENPDAQYTVLETGTHVNETHFQVTAKCTGCSRWGDEDTGYTELDPAYQTTFAFAYSETPVETPSDPASNFGIHDSLGHPIYDLATAQNANFDEVVGAL

SEQ ID NO: 157 - DNA, 708 bp, Myceliophthora thermophilia
  CDS (1)...(708)
atgcatatcttgagcttcgtctcggccttcagcctggccagcctggccctggcaagcccagtggaggtggcggagcgtcaagcccaaaagctgcggatcatgcccctgggcgacagcatcaccgagatcacctgctggcgcgccttcgtgtgggaccagctggccgcggccgggctggccgaccaggtgcagtacgtcgggtcgcagaacagcaacccgcagggctgccagccccagaccgccaactgggaccagcaccacgagggccactctggctggctggctatcgacatcgccaacaactacctggccaactggctccggagcacgcctgccgacattgtcatgttcatgctgggcaccaacgatgtcgtgcgcgggcacactacggatgagatcatcaacgcctacaccaagatggtcgagatcatgcgagcggcgaacccaaacaccaagatcattgtcgacctcgtcatcccgctccccttctccaacggcccgatccaggccatcaactcgcgcatcccccagtgggccgccggcctcaactcgaccgagtcgcccatcgtcgtcgccgattgctaccagggcttcacctcttccatgctccgcgacggtgtgcaccccaatctcgaaggcgaccgcctcatcgcctcgcgcgtcggtccgctgctgctggattacgtcaagcagtcgctgggtcagtaa

SEQ ID NO: 158 - protein, 235 aa, Myceliophthora thermophilia
MHILSFVSAFSLASLALASPVEVAERQAQKLRIMPLGDSITEITCWRAFVWDQLAAAGLADQVQYVGSQNSNPQGCQPQTANWDQHHEGHSGWLAIDIANNYLANWLRSTPADIVMFMLGTNDVVRGHTTDEIINAYTKMVEIMRAANPNTKIIVDLVIPLPFSNGPIQAINSRIPQWAAGLNSTESPIVVADCYQGFTSSMLRDGVHPNLEGDRLIASRVGPLLLDYVKQSLGQ

SEQ ID NO: 159 - DNA, 912 bp, Myceliophthora thermophilia
  CDS (1)...(912)
atgccggaaactcagttcaacgcagatgatcgtctccggaaccggaagccgattccagcgccggtgcccgcctatcttcccacagccggatcaccgctgacggtcgatacggagctctattcatccatccaacaggccccccgcgtcttggtcgaggaattcacgctcccaattcggtccggcaaggcctggaaagcggaagcaggaagcatcatccggatcagcactcccgtaggaccacaggtgggagatctgaatatctggaatgcccacaaccctcgcgagcgtttttgggcatcacgaacccggcagctccatgcaagccacgtgtcgacctacgacaggttgtggtcgtgcttgccctacatgcgaccgctggttacaatcatctcggacactctggcctggtacggcgaggacgagcacggcggccgcgtccacgacctgctcggcactcgttgcgacccctacatcaactcggtcttgagcggcgggcagtacgatttccactgccactccaacctgacccgtgcggtgcttccgtttgggctctcggaatcggatgtccacgacgtcataaacatctttcaagtgacgggcttggacgccaaggggagatacttcatgaacccttgtccagcagagagcggggaccacattgagtttctagcagagcaagacgtcttgatggctttgagtgcctgccctggaggagatttatcgttgtggggatttggcgacgctagtgagaaggaaatggtgaagtgttgtcgtccgctcaaggtcgaggtgttccgccttgcggatggcgacttcttgcaaaaggctggttggcggccagccgaaccttcaaaatatcatgggatgcatggcatggtcgttgtcgagggcgagcccgagcttacaaagtaa

SEQ ID NO: 160 - protein, 303 aa, Myceliophthora thermophilia
MPETQFNADDRLRNRKPIPAPVPAYLPTAGSPLTVDTELYSSIQQAPRVLVEEFTLPIRSGKAWKAEAGSIIRISTPVGPQVGDLNIWNAHNPRERFWASRTRQLHASHVSTYDRLWSCLPYMRPLVTIISDTLAWYGEDEHGGRVHDLLGTRCDPYINSVLSGGQYDFHCHSNLTRAVLPFGLSESDVHDVINIFQVTGLDAKGRYFMNPCPAESGDHIEFLAEQDVLMALSACPGGDLSLWGFGDASEKEMVKCCRPLKVEVFRLADGDFLQKAGWRPAEPSKYHGMHGMVVVEGEPELTK

SEQ ID NO: 161 - DNA, 1722 bp, Myceliophthora thermophilia
  CDS (1)...(1722)
atgagccggccgtacaagcgtccggctcttgcagatggagatggcgatggcgatggcgatggcgatggcgatggcgaaccaagtaggaagtacacgccggtttcgctcacacaccccgtcagtcctccgctgaagaagcggcgacgtgcacaatcgttggaggagactgagccagcccggtcgccctcagcatcccgtagggtatttgactctcccttccgcctgacaaaaattcgagacttgccccgggagatgaataaggatacaatcacactcaaggatatactgggcgacccgcttatcgcggagtgctgggagtttaactatcttcatgacatcgactttctcatggcggccttcgatccagatgtccggcatctggtaaaagttcacgtggttcacgggttctggaagagggaagacccaaacgggctggagcttcaggaagcggcatcccgcttccaaaatgtcacccttcacagcgcgttcatgccggagatgtacggcactcatcattccaagatgatgattctcctacggcgggacgacacggcccagatcgtcattcacacggccaacatgatcatccgggattggaccaacatgacccaggctgtctggctctcgccgaggctcccgctcatggaaccatcgcggtgcgacgccaggccggaggaagtcgcggcgggcagcggagccaagttcaagatcgacttcctcaactacctccgtgcctacgacacccgcaggaccacctgcagacccattattgaccagctatccaaatacgacttctccgcgatccgggggtcgctcatagctagcgtgccaggcaggcacaaactcgacgatacttcgcctaccaggtggggatgggcggcaatggagcaggccctcaaatctgtccccgtctcatccaggagatccgacattgccattcagatctcctccatagcaaccctggggccaaccgacacctggctcaagagtactttcttccgctccctcagcggcgggcgacctggcggcaccctccaacaaccacctaacttccaagtgatcttccccacacccgacgagatccgtaaatccctagatggatacagctctggggcctctatccacacaaaagtccaatcgccgcagcaggtgaagcagctagcctacctccggccaatgctttaccactgggccaacgattcggccaacggcgcggaccctcaagaaggaggaggaggaggagaaagaagaagagaagactacgagaacgacggcggtgacgatgagggagactccgccgtggtcgtcaaggaggccggccggaaacgcgcggcgccccacatcaagacgtacatccggtacggcgacaagtcgggcccctcgatcgactgggcgctggtcacgtcggccaacctgtccaagcaggcgtggggcgaggcggcggtccgcggcgccgacgggggcgcgacgatgcgcatcgcctcgtacgagatcggggtgctggtctggccggggctgtacggcgagggcgcgatcatgaggggcacgttcctgacggattcgttggggacagaggaggtgaaagagggcacgacggcggtggcgctgaggatgccgtataacctgccgctgcaaccgtatggcaagggagaggtgccgtgggtcgcgacggcgaattactcggagccggactggaaagggcaaatatggaggcacggttga

SEQ ID NO: 162 - protein, 573 aa, Myceliophthora thermophilia
MSRPYKRPALADGDGDGDGDGDGDGEPSRKYTPVSLTHPVSPPLKKRRRAQSLEETEPARSPSASRRVFDSPFRLTKIRDLPREMNKDTITLKDILGDPLIAECWEFNYLHDIDFLMAAFDPDVRHLVKVHVVHGFWKREDPNGLELQEAASRFQNVTLHSAFMPEMYGTHHSKMMILLRRDDTAQIVIHTANMIIRDWTNMTQAVWLSPRLPLMEPSRCDARPEEVAAGSGAKFKIDFLNYLRAYDTRRTTCRPIIDQLSKYDFSAIRGSLIASVPGRHKLDDTSPTRWGWAAMEQALKSVPVSSRRSDIAIQISSIATLGPTDTWLKSTFFRSLSGGRPGGTLQQPPNFQVIFPTPDEIRKSLDGYSSGASIHTKVQSPQQVKQLAYLRPMLYHWANDSANGADPQEGGGGGERRREDYENDGGDDEGDSAVVVKEAGRKRAAPHIKTYIRYGDKSGPSIDWALVTSANLSKQAWGEAAVRGADGGATMRIASYEIGVLVWPGLYGEGAIMRGTFLTDSLGTEEVKEGTTAVALRMPYNLPLQPYGKGEVPWVATANYSEPDWKGQIWRHG

SEQ ID NO: 163 - DNA, 1275 bp, Myceliophthora thermophilia
  CDS (1)...(1275)
atgaaacctgccgcgctgctcggagcggcccttgcggccgtggccttccccgcgggcgcccatgcccgctgttcttccgatgcgccgcctcccgcccccgttggcgatgacctcaccgagcccaaggagctgacggacctcttcgagaaggccaagaaggccgtcatcgatcgcctccacgaggacgagaaggccctgcgcgcccgcggcgaggcgcctcgctgcaccgccgataagctcatctttcgccgcgaatacgggtctctgtccaaggatgagcgtctcgcgtacgtcaacgcggtcaagtgcctgcagagcaagccgccgcggacgccggcgagcgtggcgcccggggcgcggtcgcggttcgacgactttgtggtggtgcacatccagcagacgctcgacatccactactcgggcatcttccaggcgtggcaccgctggttcgtgtaccagtacgagaaggcgctgcgggacgagtgcggctacacgggctaccagccgtattgggactggcccaagtacgcgagcgcgccccaggactcgcccctgttcaacggcgacccgtacagcctgggcggcaacggcgagtacgtgccccacgacgggcccgtcatcgtgccgcccgagggcgtcagcggcggcaacatctcgctcccggccggcgtcggcggcggcttcgtcaggacggggcccttcgccaacatgacggtcaacctgggccccgtcggcggcctggccgacaccgccccgggcccccagggcggcctcggctacaacccgcgcgggctcaagcgcgacctgggcggggccatgaacacgcgctacgccaactacaccaccgtcctgcgcctgctgacccagcccgacgtcgacgccttccgcaccgtctccgagggcgtcccctacacggtcgagatcggcccccacggcggcatccactacaccatcggcggcgacccgggcggcgacctcttcacctcccccggcgacccggccttctgggtccaccacgcccagatggaccgcgtctgggccacctggcaggccctcggcctcctcccccccgccgacggcggcgaccccgacccggcccgccgctacaccgacctcggcaagggcgactacgcccaccgcacctggcagaactccccgccctccccctttgccgagctgtccgacgtcatcgatatgggctacgccgccccctccaccaccatcggcgccgtcatgtccaccaccgaaggcgagctgtgctacttttatctctga

SEQ ID NO: 164 - protein, 424 aa, Myceliophthora thermophilia
MKPAALLGAALAAVAFPAGAHARCSSDAPPPAPVGDDLTEPKELTDLFEKAKKAVIDRLHEDEKALRARGEAPRCTADKLIFRREYGSLSKDERLAYVNAVKCLQSKPPRTPASVAPGARSRFDDFVVVHIQQTLDIHYSGIFQAWHRWFVYQYEKALRDECGYTGYQPYWDWPKYASAPQDSPLFNGDPYSLGGNGEYVPHDGPVIVPPEGVSGGNISLPAGVGGGFVRTGPFANMTVNLGPVGGLADTAPGPQGGLGYNPRGLKRDLGGAMNTRYANYTTVLRLLTQPDVDAFRTVSEGVPYTVEIGPHGGIHYTIGGDPGGDLFTSPGDPAFWVHHAQMDRVWATWQALGLLPPADGGDPDPARRYTDLGKGDYAHRTWQNSPPSPFAELSDVIDMGYAAPSTTIGAVMSTTEGELCYFYL

SEQ ID NO: 165 - DNA, 1332 bp, Myceliophthora thermophilia
  CDS (1)...(1332)
atgacggacgtacgcgatctgcgcatcgtcatcatcggtgcgggcatgggagggttggggaccgcactcgcgtttgccaagaaggggttcaagaacatcgacgtattcgagacggcgtccaacttgggcttcgtcggcgcgggcatccagatgccgcccaacgtcatccgggtgctccatcgcctagggtgttgggaagacatcttcgccgaggcgaccaacgtcaaggcgactagcatcaggcaggggagcacgaatgccgagctctcgcacgtggagatgccagacatcgaggagaagtacgggttcccgcactgcacggggcaccggtcgtcgctcgccggcggcctgttcaacggctgcaagaaggagaaggccatcaagttccacttctcgacggcgctggtgcgggtcaactcgttcgggcccaggccgagcatcacgctcaagccccgcgacggcgacgagtacacactcgaggccgacatagtcctggcgtcggacggcatcaagtcggtgacgcgcacgcagatgctcgccgagctgggtacggagtcgcaggaggaggacacgggccaggcggcctaccgcatcatgctcaagcggtccgagatggagcacgacccggagttgcgggagctcatcgacagcgacacggtggtgcgctgggtcggcgagcggcgccacatcatcgcgtacccggtcagcagcaagcagatctacaacctgtcgacggcccatcccgacatccacttcgcctcggccaccaacgccacgtacacgacgcggggctccaagtcggccatgctgcagatgttcgaggacttctgccccctcgtgcaccgcatgctcaacctggtgcccgacggcgaggtgtgcgagtggaagctgcgcgtgcacaagccgctgcccacctgggtgcgcgggtcggtggcgctgctgggcgacgcctgccacccgaccctgccgcaccttagccagggcgcggccatggcgatcgaggacggcgccgtgctggccgaggtcgtcagccgcatccccgccgacaaggtccacgacccggagaccatcaccaagacgctcaaggtgtacgagctgctgcgcaagccgcactgcaccgccctcgtcgacctggccacccactcgggccgcatcctgcatctcggcgagggcaaggcccgggaggagcgcgaccgcgagttccgcctcaacggcaagaacggctccgtccccgacaagtgggccagcccggacgtgcaaaacatgatttactcgcacgactgggtccaggaggccattaataggtatgatgagctatatgccagcttgtga

SEQ ID NO: 166 - protein, 443 aa, Myceliophthora thermophilia
MTDVRDLRIVIIGAGMGGLGTALAFAKKGFKNIDVFETASNLGFVGAGIQMPPNVIRVLHRLGCWEDIFAEATNVKATSIRQGSTNAELSHVEMPDIEEKYGFPHCTGHRSSLAGGLFNGCKKEKAIKFHFSTALVRVNSFGPRPSITLKPRDGDEYTLEADIVLASDGIKSVTRTQMLAELGTESQEEDTGQAAYRIMLKRSEMEHDPELRELIDSDTVVRWVGERRHIIAYPVSSKQIYNLSTAHPDIHFASATNATYTTRGSKSAMLQMFEDFCPLVHRMLNLVPDGEVCEWKLRVHKPLPTWVRGSVALLGDACHPTLPHLSQGAAMAIEDGAVLAEVVSRIPADKVHDPETITKTLKVYELLRKPHCTALVDLATHSGRILHLGEGKAREERDREFRLNGKNGSVPDKWASPDVQNMIYSHDWVQEAINRYDELYASL

SEQ ID NO: 167 - DNA, 1047 bp, Myceliophthora thermophilia
  CDS (1)...(1047)
atgagattttcggtcctctccagcatccttgccaacgcgctgtccgcctcggcgggtaccatcctgtgggatggtcgctttaatgaccttagctcctcgaaggacctggaaaaatggtcgtgggccaaccaggtcggcccttaccagtggtacatccacggctcgtcctcggtgacggcctacgtcaacctgtcgcccgattacaagaacccggccgactcgggctccaaacagggtgctaagatcacgctggacaacacagcctactggaacggtcagaacatgcgccggaccgagctgatcccgcagacgagcgccgccatcaaccagggcaaggtgtactaccacttctcgttgatgcgcaagaacaccaaccccccagcgaccacgcgcgagcaccagatcgccttctttgagagccacttcaccgagcttaaatccggcctgctgtcgggcgccccgggcgagtccgactcgctgctgcggtggtgcgtcggcggccagacccagtggagcaccgactgggaagccgacgtgtggcacaacgtcgcgtacgaaatcgacttcagcgccaacacggtcggcttctggcactcgaccggcagcgaccccctgacgcagaaggttgcccccatcagcgcgagcactagtagcaacggcgccgactggcacgtcggcgtgcttgagcttccgcgctcgggctaccccgacaccaccgaggattactactggtctggcgtttacattgagagcggcagcatcaccaccaacatcgcgggccctggtgctccatcggacggcggcagcggcaacagcactactagcgtcactgtggcccccccatcgacaacgcttgctacctcgaccaccaaggcctcctcggccactaccacctcggctcctgccacctccaccactgcgggctccggtggttgcactgcagcgcagtgggcgcagtgcgggggcatcaatttcaccggctgcaccacgtgcgcgtcgccctacaagtgcaacttcatcaacgactactactcacagtgctattaa

SEQ ID NO: 168 - protein, 348 aa, Myceliophthora thermophilia
MRFSVLSSILANALSASAGTILWDGRFNDLSSSKDLEKWSWANQVGPYQWYIHGSSSVTAYVNLSPDYKNPADSGSKQGAKITLDNTAYWNGQNMRRTELIPQTSAAINQGKVYYHFSLMRKNTNPPATTREHQIAFFESHFTELKSGLLSGAPGESDSLLRWCVGGQTQWSTDWEADVWHNVAYEIDFSANTVGFWHSTGSDPLTQKVAPISASTSSNGADWHVGVLELPRSGYPDTTEDYYWSGVYIESGSITTNIAGPGAPSDGGSGNSTTSVTVAPPSTTLATSTTKASSATTTSAPATSTTAGSGGCTAAQWAQCGGINFTGCTTCASPYKCNFINDYYSQCY

SEQ ID NO: 169 - DNA, 876 bp, Myceliophthora thermophilia
  CDS (1)...(876)
atgctggttcgctcgttcctcgggttcgccgtcttggcggcaacatgcctcgccgcctcgctgcaggaggtcaccgagtttggagacaacccgaccaacattcagatgtacatctacgtgcccgatcagctggacaccaaccccccagtgatcgttgcgctccatccctgcggcggaagcgcccagcagtggttcagcgggacccagctgccgtcgtatgccgacgacaacggcttcatcctcatctaccctagcacgccgcacatgagcaactgctgggacatccagaacccggacaccctgacccacggccagggcggcgacgcgctgggtatcgtcagcatggtcaactacaccctcgacaagcactcgggcgacagctcgcgcgtgtacgccatgggcttctcgtccggcggcatgatgaccaaccagctcgccggctcgtacccggacgtgttcgaggccggcgccgtgtactcgggtgtggcctttggttgtgctgcgggcgccgaatctgctacgccgttcagtcccaaccagacctgcgcccagggcctacagaagacagcgcaggagtggggcgactttgtccggaatgcctatgcgggatataccgggcggcggccgcggatgcagatcttccacgggcttgaagacactctcgtcaggccgcagtgcgccgaggaggcgctcaagcagtggtccaacgtcctgggcgtcgagttgacgcaggaggtgagcggagtgccgtcccccgggtggacccagaagatctatggcgacgggacgcagctgcagggattctttggccagggcatcggccatcagtcgacagtgaacgagcagcagctgctccagtggtttggcttgatctga

SEQ ID NO: 170 - protein, 291 aa, Myceliophthora thermophilia
MLVRSFLGFAVLAATCLAASLQEVTEFGDNPTNIQMYIYVPDQLDTNPPVIVALHPCGGSAQQWFSGTQLPSYADDNGFILIYPSTPHMSNCWDIQNPDTLTHGQGGDALGIVSMVNYTLDKHSGDSSRVYAMGFSSGGMMTNQLAGSYPDVFEAGAVYSGVAFGCAAGAESATPFSPNQTCAQGLQKTAQEWGDFVRNAYAGYTGRRPRMQIFHGLEDTLVRPQCAEEALKQWSNVLGVELTQEVSGVPSPGWTQKIYGDGTQLQGFFGQGIGHQSTVNEQQLLQWFGLI

SEQ ID NO: 171 - DNA, 1227 bp, Myceliophthora thermophilia
  CDS (1)...(1227)
atgacaaccgaattcgaggcccgcctcaagaaggccgtcgacgagcgcctcattccgaatgccgtcgtcctcgcacgagacaagtctggaaagatcgactactccttctcgtacgggccgacgacgctcgatcccgatgccaccccagcccagatcagcccggactccatgttcagcatgttctcgatgacgaagctcatcacgtccatctgcgccctgaagctcgtcgaggaaggggtcgtcgggctcgacgaggacgtctcgaagcacctcgaggcgctggccgcgcaacccgtcctgacgggcttcgacgacgccaccgggcagccgacctacaaggaccgcacccggcccatcaccctgcgccgcctgctcacccactcggccggcaccggctacatcctgatggacgaccgcctgcgccgctgggccgaggctaccggccggcccgtgcccgtcccgctgcggcgcggcggcggcagcaccgtcgacacgcgcttcaactacccgctgctcttcgagcccggcgagagctgggcctacggcagcgggctcgactgggccggccgcctggtcgagaagctgtcgggcgtcccgctcgacgacttcgcgtaccagaacgtgctcgagccggtcggcgtccccaggggcgccatgaccttccacccgctccggttcgcgtcccggtcctccccgcccgacgaaacgctcgtcggcacggccagccgggacccgggctcgggcaaggtggtagcgttcctgccgacggaggagcagcactacggcgagcagcacgacgcgttcggcggcgagggcctgttcggcggcgccggccagtacctcaaggtcctgcactcgatcctggccgacgacggcaagatcctcaagccccagacggccaagtacctcttcgaacccctgctggagcccgcggccagggaggcgctgaacctggcgctccacgcgaccgactgggccgtcggcgtcatccccaagggcgtcgactacgactggagcgccggcggcctgctgtcgaccggcggcgacggcctcgggcacaggaacaaggggttcctccagtggagcggcatgctgaacatgtcatggtttattgaccgcgaggcgggcgtctgtggcgtgtttggcacccagctccttccggtgaatgacgccaaggtcaaggagttgaccaaggaatttgaggacgccatctactcgaggctttga

SEQ ID NO: 172 - protein, 408 aa, Myceliophthora thermophilia
MTTEFEARLKKAVDERLIPNAVVLARDKSGKIDYSFSYGPTTLDPDATPAQISPDSMFSMFSMTKLITSICALKLVEEGVVGLDEDVSKHLEALAAQPVLTGFDDATGQPTYKDRTRPITLRRLLTHSAGTGYILMDDRLRRWAEATGRPVPVPLRRGGGSTVDTRFNYPLLFEPGESWAYGSGLDWAGRLVEKLSGVPLDDFAYQNVLEPVGVPRGAMTFHPLRFASRSSPPDETLVGTASRDPGSGKVVAFLPTEEQHYGEQHDAFGGEGLFGGAGQYLKVLHSILADDGKILKPQTAKYLFEPLLEPAAREALNLALHATDWAVGVIPKGVDYDWSAGGLLSTGGDGLGHRNKGFLQWSGMLNMSWFIDREAGVCGVFGTQLLPVNDAKVKELTKEFEDAIYSRL

SEQ ID NO: 173 - DNA, 3231 bp, Myceliophthora thermophilia
  CDS (1)...(3231)
atgcttaccgcgggcgtgaagggagccctctggctcgccttcggctcggtggtggccgctctgggacaggagagcatcatctcgaccaacgcccatggcgcccacttccagatcgccggcggccacgtgggcaagggccagattctggtctcgagcaacgactactggggtgtcatccgcgctgccggtgacctcgccgtcgacttcggccgcgtcacgggaacgaactacacgctcagcaacggtgagaggaacgcggcccccgcgacgtacacgtaccatccggtcaacaacaagaataacacttactattccacgaccgggaccgccaacttcaccggcccggcctacgcagaccccgacccggagaaggtggtgatcattgccggcaccattggccactccaaggtaatcgacaagctgattgcgtcgcggtccctcgacgtgtcgcgcgtcaagggcaagtgggagtcgttcaccagccagctggtcaagaacccggtgccgggatgcaagcaggcgctcgtggtagccggaagcgacccccgcggcaccatctacggcatctacgacatcagcgagcagatcggcgtcagcccgtggtacttctgggccgacagcccgcccaggaagcacaagaacctctatgtcacgaccaagaagaaggtccagggcccgccgtccgtcaagtaccgcggtttcttcctgaacgacgagcagccggcgttgacgaactgggtcgcctcccactggcaggacaccccctacggccccggctatggcgcagccttctacggcctcatcttcgagctgctgctccgcctccgcgccaactacctgtggcccgccatctgggcgaccatgttcgaggttgacgaccccgcgaaccagcccctggccgacgccttcgaggtcgtcatcggatcctcgcacacggagcccctgatgcgcgcacagaacgagttcggccacttctacgagggcccgtgggcctacaacctcaacaacaagaccatcgacgactacttccggtacggcgtccagcgcgccaagccgtacgcccgcaacagcctgtggaccatgggcatgcgcggaaccggcgacacggccatcgagggcctcggcgtcgagtacattgtcgagatgctgcagaccctggtcaagaaccagcgccagatcatggccgagggcctcggcatcaaggacatcaccacggtacctcagatgtggtgcctctacaaggaggtcatgtcctacctctcggccggcctgcaggttcccgacgacgtgacgctgctgtgggccgacgacaactggggcaacgtgcgccggctgccgctgcggaacgagacgcagcgccacggcggcgccggcatctactaccacttcgactacgtcggcgggccgcgcgactacaagtggatcaacacgatccagctgaccaagacggccgagcagatgcacatggcctacgcccgcggcgccgacaggatctggatcgtcaacgtcggcgacatgaaggcgctcgagatccccatcagccacttcttcgatctcggctacgacgccgagcgctggcacgtcgacagcacccgggaatgggccgaggcctgggccgcccgcgagttcgggcccgcccgcgcccgcgagatcgccgacgtcatgatgaagtacggcatgtacgcggcccgccgcaagtacgagctggtcgagccctgggtctactcggtcatcaactacaacgaggccgaggcggtgctgcagcagtgggccgagctcgtcgccgacgcccaggccatctacgacgagctccccgccgaggccaagcccgccttcttccagaccgtcctccacccggccctcgccggcgagatcgtgcaccagatcaacgtcggcggcgcccggaacatgctgtacgccggccagaagcgcaacgccgccaacaaggccatccaggacgtcctcgcttactcggccgccgacgcgaacctcactcgccgctgggatgctctcctcgatgggaagtggaagcacttcatggaccaaacacatctcggctacgacggctactggcaacagcccatgcgtaacgcgctcccgcccatggtgtatgtccagaccgacttcacctccctcgctggtgagatcggcatcggtgtcgagggctccaacgccaccgtcaagggcgacgacaggtggcacgccaacagcggcaacgacctcaccctgccgcccctcgacccgtacggcccggccacgcgctacatcgacatcttctctcgcggctccgaggagtgttcctggaccttatcctcctccaaaccctggctcaagctgtcccagtccacgggcgtcgtcgggcccaaccgcccggacacccgcgtcctcgtctcggtcgactggaagtccgccccgcccgccccgtactccgaaacggtccagatcaacatcaccacccagtgcacgggaatggaccggtacggcttcggcgacccgcacgtccttgtgcccgtgacggtgcgcggtgtgcccaagtcgttcaagcgcggcttcgtcgagtcggacggcaccgtcgccttcgccgccgagcactacagcaggatcgtcgagcccgctagcaagggcaacggtaagggtaagggtaagggcaacgacgaggacgtcacctaccacaccttcgcctcgtacggccgcacctcgtccggcgtcggcctggtcccgctgggcgccgagaagctcgcgcgcgaggaggcgcccgcgctcgagtacgacctctacctcttcaccaacacctcggccgccaacgtgacgctgtacctgtccccggcgctcaactacctcggcgacgccaccccgctcgagtacgccgtcgccctgttccccgcttcctcctcctccggcccctcaccggaggacgacgacgacgcagttgccgtcaagcacgtccagcccgtcggcgccaccgagggcggcaacatgccgcgcggctgggacggcgcggtcgccgacggcgtctggggcctcacgggcggctacaccaccagctcgttcgaggtcgcccgcgagggcgcctacaagctgcgcgtgtgggccctcatgcccggcgtggtggtccagaaggtcgtcgtcgacctcggcggcgtccggcccagctacctgggcccgcccgagagcttcctcgtgggcagggaccggatcggagcgaggaacggaaccagcttcctggggtga

SEQ ID NO: 174 - protein, 1076 aa, Myceliophthora thermophilia
MLTAGVKGALWLAFGSVVAALGQESIISTNAHGAHFQIAGGHVGKGQILVSSNDYWGVIRAAGDLAVDFGRVTGTNYTLSNGERNAAPATYTYHPVNNKNNTYYSTTGTANFTGPAYADPDPEKVVIIAGTIGHSKVIDKLIASRSLDVSRVKGKWESFTSQLVKNPVPGCKQALVVAGSDPRGTIYGIYDISEQIGVSPWYFWADSPPRKHKNLYVTTKKKVQGPPSVKYRGFFLNDEQPALTNWVASHWQDTPYGPGYGAAFYGLIFELLLRLRANYLWPAIWATMFEVDDPANQPLADAFEVVIGSSHTEPLMRAQNEFGHFYEGPWAYNLNNKTIDDYFRYGVQRAKPYARNSLWTMGMRGTGDTAIEGLGVEYIVEMLQTLVKNQRQIMAEGLGIKDITTVPQMWCLYKEVMSYLSAGLQVPDDVTLLWADDNWGNVRRLPLRNETQRHGGAGIYYHFDYVGGPRDYKWINTIQLTKTAEQMHMAYARGADRIWIVNVGDMKALEIPISHFFDLGYDAERWHVDSTREWAEAWAAREFGPARAREIADVMMKYGMYAARRKYELVEPWVYSVINYNEAEAVLQQWAELVADAQAIYDELPAEAKPAFFQTVLHPALAGEIVHQINVGGARNMLYAGQKRNAANKAIQDVLAYSAADANLTRRWDALLDGKWKHFMDQTHLGYDGYWQQPMRNALPPMVYVQTDFTSLAGEIGIGVEGSNATVKGDDRWHANSGNDLTLPPLDPYGPATRYIDIFSRGSEECSWTLSSSKPWLKLSQSTGVVGPNRPDTRVLVSVDWKSAPPAPYSETVQINITTQCTGMDRYGFGDPHVLVPVTVRGVPKSFKRGFVESDGTVAFAAEHYSRIVEPASKGNGKGKGKGNDEDVTYHTFASYGRTSSGVGLVPLGAEKLAREEAPALEYDLYLFTNTSAANVTLYLSPALNYLGDATPLEYAVALFPASSSSGPSPEDDDDAVAVKHVQPVGATEGGNMPRGWDGAVADGVWGLTGGYTTSSFEVAREGAYKLRVWALMPGVVVQKVVVDLGGVRPSYLGPPESFLVGRDRIGARNGTSFLG

SEQ ID NO: 175 - DNA, 663 bp, Myceliophthora thermophilia
  CDS (1)...(663)
atgcagcacattctcgctcttgtggctctcgtgcccgccgtccttgcgcagacctactatggctgttacaccgagatacctgctcgcgccctgaccggttcttccctgatcgactatgagaacatgaccattgctgtctgcgaggctcactgcacgggactggactttgacatctggggcgtcgagtacgggggcgagtgctactgtggcaacgccctcgcccaggggtcgttccccgccttcgtgacagactgcgccatgccgtgcccgggcgacgcggcgaccgtgtgcggcgggcccaaccggctgtccctctacggcgcgtccgaggaggcgccggtcgtgaccccgcagccgcacgacccggtgagcgagactcagtacgcgggttgctggagcgaggtagagggcggcgcgcgcgccctcgcgggcaccagcgccttctccctctccgcaatgaccgtccccgcctgtggcgactactgcctcaacagcggcttcctgtggtttggcctcgagtacggcgccgagtgctactgcggcgaggagctcagtgtcaacagcaccagcgtcgccgaggctgactgcgacatgccgtgctcgggcgatgcggcgaccacgtgtggcggttcgaaccggctaagcgtctaccagtgggtgtaa

SEQ ID NO: 176 - protein, 220 aa, Myceliophthora thermophilia
MQHILALVALVPAVLAQTYYGCYTEIPARALTGSSLIDYENMTIAVCEAHCTGLDFDIWGVEYGGECYCGNALAQGSFPAFVTDCAMPCPGDAATVCGGPNRLSLYGASEEAPVVTPQPHDPVSETQYAGCWSEVEGGARALAGTSAFSLSAMTVPACGDYCLNSGFLWFGLEYGAECYCGEELSVNSTSVAEADCDMPCSGDAATTCGGSNRLSVYQWV

SEQ ID NO: 177 - DNA, 1206 bp, Myceliophthora thermophilia
  CDS (1)...(1206)
atgcggacttcctacggcgtcgctttcgccctctccgccggcttccggctggcgaccgccgccccggtctgtggcggcggcagcgcttcagatctcctctgggtcaccacttaccccgcgggtgagggcgcgcagggcaagctcctcaccctcaagctggacgggtccaagctggaagtcgttgccgagtccgacacttgcggcccctatccttcttggttgacccaggctggtgacgttctctactgcgtcgacgaagcctggggcggcgaccacggcaccctgcactcgctcaagatcaatgacgatcatagcttcaccaacctgagccaacatgagaccgttggaggcccagtgagcaccgtcatctacggcaaggacggccttggattggcagtggctgattatgccggaggcggtatcgatacattcaacattgccgatcccgctgcgattaagctgatcaagtccctcgtgtacccggccccgaccgacggccttcccgacccgcagaactcagcccggcctcatgaggccatcctggatcccacgggcgagttcctcgtcttccccgacctgggcgccgatcagattcgcgtcctgaaggtggacaaagagacgctggagtacgtcgagaagccgagctacaccgactttgaccgtggcactggtcctaggcacggcgccttcttcaagtctggcgacaagaccttcttctacctcgtcggcgagctctcgaacctgctccagggcttctccgtcgcgtacaatgacgacgatagcctcaccttcacccggatccacaactccacaacccacggtgacgacaagccgctcccggaggacacggctgcggccgagctttggatcgcccccgggagcaacttccttaccctctcgtctcgctttgagagctcgctagagtacacggttgccaacggcaccaaggtgccctcggacccgctcatcaccttctccatcgacaaggagacgggcgccctcacccacgtgcagtcggcccctgcgggcggcatcaacccgcgtcacttctccttcaacagcgacggcacccgcgttgcttctgcgctgcagtccgacggccgcgtcgtcgtctttgagcgcgacccttctactggcaagataggcaaggccactgccgaaggagatgtcgaggggatgcccaactttgccacgtttaagcagtag

SEQ ID NO: 178 - protein, 401 aa, Myceliophthora thermophilia
MRTSYGVAFALSAGFRLATAAPVCGGGSASDLLWVTTYPAGEGAQGKLLTLKLDGSKLEVVAESDTCGPYPSWLTQAGDVLYCVDEAWGGDHGTLHSLKINDDHSFTNLSQHETVGGPVSTVIYGKDGLGLAVADYAGGGIDTFNIADPAAIKLIKSLVYPAPTDGLPDPQNSARPHEAILDPTGEFLVFPDLGADQIRVLKVDKETLEYVEKPSYTDFDRGTGPRHGAFFKSGDKTFFYLVGELSNLLQGFSVAYNDDDSLTFTRIHNSTTHGDDKPLPEDTAAAELWIAPGSNFLTLSSRFESSLEYTVANGTKVPSDPLITFSIDKETGALTHVQSAPAGGINPRHFSFNSDGTRVASALQSDGRVVVFERDPSTGKIGKATAEGDVEGMPNFATFKQ

SEQ ID NO: 179 - DNA, 813 bp, Myceliophthora thermophilia
  CDS (1)...(813)
atggcagcacctgcatcagtggaaaatgtcgacctcaggcaggatatcgacccaaatgcgtcgccggccggcagcatcgacaccaatacaacccctgataccgaattctcgcctccggaaagccctctccagcggggcggaccgcccaaggatgcgaggaaactggcgagaaccaagctggccaccttgacgacggaagaaaaggtatctctcctgacagccgcagacttctggagaacaaaagcgattccatccaagaacatcccggcagtaaagacgagtgatgggcctaacggcgctcgcggtggcatctttgtggggggcacaaaagctgcgcttttcccctgcggtatctcgctggcagcaacatggaataaggatctcctttaccaggttggccagcaccttgcggacgaggtcaaggctcggtcggccaatgtcctgctcgcccctacagtctgcatgcacagacacccgctgggtgggaggaactttgagtctttctccgaggatcctctcttgtgcggcaagctggctgcccagtacatcaagggtctccaggagaaaggcgtcgccgctaccataaaacactttgtcggaaacgagcaggagacgaacaggatgaccatcaactcgatcatcgccgaacggccgcttcgcgaactctaccttcgcccgttcgagattgcggttcgcgaggccaagccgtgggctctcatgagttcttataaccttgtcaacggcgtccacgcggacatgaacacgcacatcctcagggatatcctccgcggtgagtggggatacgatgggtaa

SEQ ID NO: 180 - protein, 270 aa, Myceliophthora thermophilia
MAAPASVENVDLRQDIDPNASPAGSIDTNTTPDTEFSPPESPLQRGGPPKDARKLARTKLATLTTEEKVSLLTAADFWRTKAIPSKNIPAVKTSDGPNGARGGIFVGGTKAALFPCGISLAATWNKDLLYQVGQHLADEVKARSANVLLAPTVCMHRHPLGGRNFESFSEDPLLCGKLAAQYIKGLQEKGVAATIKHFVGNEQETNRMTINSIIAERPLRELYLRPFEIAVREAKPWALMSSYNLVNGVHADMNTHILRDILRGEWGYDG

SEQ ID NO: 181 - DNA, 1476 bp, Myceliophthora thermophilia
  CDS (1)...(1476)
atgttctggttaccgctgcgcagcagaccgatcgccctcccgacaacaagcgatgacccgccatcgccgctgcagctcccggcaccggtaccatcccgagaacaacggggaccgagtcgaacacgaagttgcagcctcctctcaccctcttccccctcttccccctctcgatttctccgccaccgccatcaccatcgccatcatcgccggccgatgctcgcgcttctcctgaccgtcgccgctctcggggccgccgccttattctttctgcagctctaccgtaccgagtcgcgtctgcgcaccccctggacgcccgaccggtcgtcgcgcctcttcgcccagcggccgctcccaccgccggtcgagggaacgttcctgtcatcaccgcactatacgttgccgctgcgcacgcgcgggcgcgatgtggtggatgcgcgggggcggcggttcaagctggcgagcgtcaactggtacggggcgagcgacgagctgatggtgccgggagggctggacgtgcggcaccggcgcgagatcgcgcgggccgtgcgccggctcggcttcaactcggtccgcctgccctactcggacgagatggtggcgactaacccgcccgtcgacgcccgcctggtggccgccaacccggacctggcgggcgcgcgggccctagacgtctacgtcgccgtcgtcgaggcgctgacggccgagggcgtcgccgtcgtggtcaacaaccacatcacgagcgcgacctggtgctgcggcgccgacccctgcgacgccggctgggccaacgaccacctgccggccgccctgtgccgcgtccgccagacggaggaccagtggatcgagcactgggagaccgtcatggccaggctggccgacaacccgctcgtcatcggcgccgacctgcgcaacgaggtccggggactctggggcaccatgccctgggcgcgctgggcggcggccgccgagagggccggcaaccggctgctccgcatgaacccggactggctcatcatcgtgggcggcaccgagtcgcagaacgacctgacgggcgtcgccacgcggcccgtcgtgctcgacctccccgaccgcgtcgtctactcggcccacgtctactcgtggagcggctggggcagctgggggggccggtacgcgacccggtcgtacccgagcttcgtccagtcggcgcgcaagaactgggcctacctggtcgagggggacgtggcgcccgtctgggtgggcgagttcggcgcgccccgctcgcccggccgcggcgacgccaactactggaacaacctgctccgctacctcaagaccatcgacgccgacttcggctactgggccctcaacccgcgcaagccccggcataacgagacggagacgtacgccctcctcgaggacgactgggtcaccccggtgctggactaccggctgaaggacctgaccgagctgatgcgagctggcaccaccacctga

SEQ ID NO: 182 - protein, 491 aa, Myceliophthora thermophilia
MFWLPLRSRPIALPTTSDDPPSPLQLPAPVPSREQRGPSRTRSCSLLSPSSPSSPSRFLRHRHHHRHHRRPMLALLLTVAALGAAALFFLQLYRTESRLRTPWTPDRSSRLFAQRPLPPPVEGTFLSSPHYTLPLRTRGRDVVDARGRRFKLASVNWYGASDELMVPGGLDVRHRREIARAVRRLGFNSVRLPYSDEMVATNPPVDARLVAANPDLAGARALDVYVAVVEALTAEGVAVVVNNHITSATWCCGADPCDAGWANDHLPAALCRVRQTEDQWIEHWETVMARLADNPLVIGADLRNEVRGLWGTMPWARWAAAAERAGNRLLRMNPDWLIIVGGTESQNDLTGVATRPVVLDLPDRVVYSAHVYSWSGWGSWGGRYATRSYPSFVQSARKNWAYLVEGDVAPVWVGEFGAPRSPGRGDANYWNNLLRYLKTIDADFGYWALNPRKPRHNETETYALLEDDWVTPVLDYRLKDLTELMRAGTTT

SEQ ID NO: 183 - DNA, 1521 bp, Myceliophthora thermophilia
  CDS (1)...(1521)
atggacggaggaccctccgacgcagaaccgggttgggttgtcgctccgggccacacccatgacaatacaactctccatcgcagcaacggcagcggtgtgagcgccatgccagatccgaccagcctcgaagattccaggacggtcaaagccgacactagaagcaggtcgcccgggcgactcaacccaatccgggccgagcaactggggctaatgaccgacagcgatgcaacccaggacccctcccgctcgtcagtgttgtatcctcttctggccggtatcatgcactccaaagctttcttggcagcgcttcttgcgcctgccgtctcagggcaactgaacgacctcgccgtcagggctggactcaagtactttggtactgctcttagcgagagcgtcatcaacagtgatactcggtatgctgccatcctcagcgacaagagcatgttcggccagctcgtccccgagaatggcatgaagtgggatgctactgagccgtcccgtggccagttcaactacgcctcgggcgacatcacggccaacacggccaagaagaatggccagggcatgcgttgccacaccatggtctggtacagccagctcccgagctgggtctcctcgggctcgtggaccagggactcgctcacctcggtcatcgagacgcacatgaacaacgtcatgggccactacaagggccaatgctacgcctgggatgtcatcaacgaggccatcaatgacgacggcaactcctggcgcgacaacgtctttctccggacctttgggaccgactacttcgccctgtccttcaacctagccaagaaggccgatcccgataccaagctgtactacaacgactacaacctcgagtacaaccaggccaagacggaccgcgctgttgagctcgtcaagatggtccaggccgccggcgcgcccatcgacggtgtcggcttccagggccacctcattgtcggctcgaccccgacgcgctcgcagctggccaccgccctccagcgcttcaccgcgctcggcctcgaggtcgcctacaccgagctcgacatccgccactcgagcctgccggcctcttcgtcggcgctcgcgacccagggcaacgacttcgccaacgtggtcggctcttgcctcgacaccgccggctgcgtcggcgtcaccgtctggggcttcaccgatgcgcactcgtggatcccgaacacgttccccggccagggcgacgccctgatctacgacagcaactacaacaagaagcccgcgtggacctcgatctcgtccgtcctggccgccaaggccaccggcgccccgcccgcctcgtcctccaccaccctcgtcaccatcaccacccctccgccggcatccaccaccgcctcctcctcctccagtgccacgcccacgagcgtcccgacgcagacgaggtggggacagtgcggcggcatcggatggacggggccgacccagtgcgagagcccatggacctgccagaagctgaacgactggtactggcagtgcctgtaa

SEQ ID NO: 184 - protein, 506 aa, Myceliophthora thermophilia
MDGGPSDAEPGWVVAPGHTHDNTTLHRSNGSGVSAMPDPTSLEDSRTVKADTRSRSPGRLNPIRAEQLGLMTDSDATQDPSRSSVLYPLLAGIMHSKAFLAALLAPAVSGQLNDLAVRAGLKYFGTALSESVINSDTRYAAILSDKSMFGQLVPENGMKWDATEPSRGQFNYASGDITANTAKKNGQGMRCHTMVWYSQLPSWVSSGSWTRDSLTSVIETHMNNVMGHYKGQCYAWDVINEAINDDGNSWRDNVFLRTFGTDYFALSFNLAKKADPDTKLYYNDYNLEYNQAKTDRAVELVKMVQAAGAPIDGVGFQGHLIVGSTPTRSQLATALQRFTALGLEVAYTELDIRHSSLPASSSALATQGNDFANVVGSCLDTAGCVGVTVWGFTDAHSWIPNTFPGQGDALIYDSNYNKKPAWTSISSVLAAKATGAPPASSSTTLVTITTPPPASTTASSSSSATPTSVPTQTRWGQCGGIGWTGPTQCESPWTCQKLNDWYWQCL

SEQ ID NO: 185 - DNA, 681 bp, Myceliophthora thermophilia
  CDS (1)...(681)
atggttaccctcactcgcctggcggtcgccgcggcggccatgatctccagcactggcctggctgccccgacgcccgaagctggccccgaccttcccgactttgagctcggggtcaacaacctcgcccgccgcgcgctggactacaaccagaactacaggaccagcggcaacgtcaactactcgcccaccgacaacggctactcggtcagcttctccaacgcgggagattttgtcgtcgggaagggctggaggacgggagccaccagaaacatcaccttctcgggatcgacacagcatacctcgggcaccgtgctcgtctccgtctacggctggacccggaacccgctgatcgagtactacgtgcaggagtacacgtccaacggggccggctccgctcagggcgagaagctgggcacggtcgagagcgacgggggcacgtacgagatctggcggcaccagcaggtcaaccagccgtcgatcgagggcacctcgaccttctggcagtacatctcgaaccgcgtgtccggccagcggcccaacggcggcaccgtcaccctcgccaaccacttcgccgcctggcagaagctcggcctgaacctgggccagcacgactaccaggtcctggccaccgagggctggggcaacgccggcggcagctcccagtacaccgtcagcggctga

SEQ ID NO: 186 - protein, 226 aa, Myceliophthora thermophilia
MVTLTRLAVAAAAMISSTGLAAPTPEAGPDLPDFELGVNNLARRALDYNQNYRTSGNVNYSPTDNGYSVSFSNAGDFVVGKGWRTGATRNITFSGSTQHTSGTVLVSVYGWTRNPLIEYYVQEYTSNGAGSAQGEKLGTVESDGGTYEIWRHQQVNQPSIEGTSTFWQYISNRVSGQRPNGGTVTLANHFAAWQKLGLNLGQHDYQVLATEGWGNAGGSSQYTVSG

SEQ ID NO: 187 - DNA, 210 bp, Myceliophthora thermophilia
  CDS (1)...(210)
atgggtcgcggcgctgctttcctaggcctcgcctcgctcctcgtgggcgcggccaaggcccagacgcccggcgagggcgaggaggtgcacccgcagatcacgacgtaccgctgcaccaaggcggacgggtgcgaggagaagaccaactacatcgtgctggacgccctatcgccccggtccccaggaacgcatcatgacccgtccggatag

SEQ ID NO: 188 - protein, 69 aa, Myceliophthora thermophilia
MGRGAAFLGLASLLVGAAKAQTPGEGEEVHPQITTYRCTKADGCEEKTNYIVLDALSPRSPGTHHDPSG

SEQ ID NO: 189 - DNA, 1122 bp, Myceliophthora thermophilia
  CDS (1)...(1122)
atgcatctctcctcgtctctcctcctcctcgccgccttgcccctgggcatcgccggcaagggcaagggccacggccacggcccccataccgggctccacaccctcgccaagcaggccggcctcaagtacttcggctctgccaccgactctcccggccagcgtgagcgcgccggctacgaggacaagtacgcccagtacgaccagatcatgtggaagtcgggcgagttcggcctgacgaccccgaccaacggccaaaagtggctgtttactgagcccgagcgtggcgtgttcaacttcaccgagggtgacatcgtgacgaacctggcccggaagcacggtttcatgcagcggtgccacgcgctcgtctggcacagccagctcgccccttgggtcgagtcgaccgagtggacgcccgaggagctgcgccaggtcattgtcaaccacatcacccacgtggccggctactacaagggcaagtgctatgcctgggacgtcgtcaacgaggccctgaacgaggacggcacctaccgcgagtccgtcttctacaaggtgctcggcgaggactacatcaagctggccttcgagacggccgccaaggtcgacccccacgccaagctctactacaacgactacaacctcgagtcccccagcgccaagaccgagggcgccaagcgcatcgtcaagatgctcaaggacgccggcatccgcatcgacggcgtcggcctgcaggcccacctcgtcgccgagagccacccgaccctcgacgagcacatcgatgccatcaagggcttcaccgagctcggcgtcgaggtcgccctgaccgagctcgacatccgcctctccatcccggccaacgccaccaacctcgcccagcagagggaggcgtacaagaacgtcgtcggcgcttgcgtccaggttcgcggctgcattggcgtggagatctgggacttctatgaccccttcagctgggtccctgccaccttccccggccagggcgcccccctgctctggttcgaggacttttccaagcaccccgcctacgacggcgtcgtcgaggccctgaccaacaggaccacgggcgggtgcaagggcaagggcaagggcaagggcaagaccaattag

SEQ ID NO: 190 - protein, 373 aa, Myceliophthora thermophilia
MHLSSSLLLLAALPLGIAGKGKGHGHGPHTGLHTLAKQAGLKYFGSATDSPGQRERAGYEDKYAQYDQIMWKSGEFGLTTPTNGQKWLFTEPERGVFNFTEGDIVTNLARKHGFMQRCHALVWHSQLAPWVESTEWTPEELRQVIVNHITHVAGYYKGKCYAWDVVNEALNEDGTYRESVFYKVLGEDYIKLAFETAAKVDPHAKLYYNDYNLESPSAKTEGAKRIVKMLKDAGIRIDGVGLQAHLVAESHPTLDEHIDAIKGFTELGVEVALTELDIRLSIPANATNLAQQREAYKNVVGACVQVRGCIGVEIWDFYDPFSWVPATFPGQGAPLLWFEDFSKHPAYDGVVEALTNRTTGGCKGKGKGKGKTN

SEQ ID NO: 191 - DNA, 858 bp, Myceliophthora thermophilia
  CDS (1)...(858)
atgaccctagtgtacaagcccgaagcctccggtcttgcggacgagggagccgccacttccaacaagcagcatccacaggacgaggacgcggacttgtacttggatcccaccaggaagaccaacaacaacaacaacaacaacaaaaaaatcatcttcgtcgcaaacatggtctccttcaaggccctcgttctcggcgccgttggcgccctctccttccctttcaacgtcaccgagctgtccgaggcgcacgcccggggcgagaatgtgaccgagctcttgatgtctcgcgccggcacgccgagccagaccggctggcacgggggctactacttctccttctggaccgacaacggcggcaccgtcaactactggaacggcgacaatggcagatacggtgtccagtggcagaactgcggcaactttgtcggcggtaagggatggaaccccggcgcggcgcggaccatcaacttcagcggctccttcaacccgtcgggcaacgggtacctggccgtgtacgggtggacgcagaacccgctgatcgagtactacatcgtcgagtcgttcggcacgtacgacccgtcgtcgcaggcccaggtcctcggcaccttctaccaggacggcagcaactacaagatcgccaagacgacccgctacaaccagccctccatcgagggcaccagcaccttcgaccagttctggtccgtccgcgagaaccaccgcaccagcggcagcgtcaacgtcggcgcccacttcgcccgctggcagcaggccggcctccgcctcggcacccacaactaccaaatcatggccaccgagggctaccagagcagcggctcctccgatatcaccgtctggtaa

SEQ ID NO: 192 - protein, 285 aa, Myceliophthora thermophilia
MTLVYKPEASGLADEGAATSNKQHPQDEDADLYLDPTRKTNNNNNNNKKIIFVANMVSFKALVLGAVGALSFPFNVTELSEAHARGENVTELLMSRAGTPSQTGWHGGYYFSFWTDNGGTVNYWNGDNGRYGVQWQNCGNFVGGKGWNPGAARTINFSGSFNPSGNGYLAVYGWTQNPLIEYYIVESFGTYDPSSQAQVLGTFYQDGSNYKIAKTTRYNQPSIEGTSTFDQFWSVRENHRTSGSVNVGAHFARWQQAGLRLGTHNYQIMATEGYQSSGSSDITVW

SEQ ID NO: 193 - DNA, 444 bp, Myceliophthora thermophilia
  CDS (1)...(444)
atgaaacacccggtctacaggaaccccggccaggcccgcaccatcacctactcgggcaccgtcgacttccagggcggcaacggctacctggccatctacggctggacgcagaacccgctgatcgagtactacatcgtcgagtcgttcggctcgtacgacccctcgtcgcaggcccagactttcggcaccgtcgaggtggacggcggcacctacacgctggccaagacgacgcgcgtcaaccagccctcgatcgagggcaccagcaccttcgaccagttctggtccgtccgccagcagcaccgcacctccggctccgtcgacgtcggcgcccacttcgacgcctgggccaaggccggcctccagctcggcacccacaactaccagatcgtcgccaccgagggctaccagagcagcggctcctcttccatcaccgtccaggcctaa

SEQ ID NO: 194 - protein, 147 aa, Myceliophthora thermophilia
MKHPVYRNPGQARTITYSGTVDFQGGNGYLAIYGWTQNPLIEYYIVESFGSYDPSSQAQTFGTVEVDGGTYTLAKTTRVNQPSIEGTSTFDQFWSVRQQHRTSGSVDVGAHFDAWAKAGLQLGTHNYQIVATEGYQSSGSSSITVQA

SEQ ID NO: 195 - DNA, 1113 bp, Myceliophthora thermophilia
  CDS (1)...(1113)
atgcgtctcaccaagacggacctcagcgtcgcgctgctcgcgtcggccctacccgcaacccaggcggcgtgcagcctcccctcgtcctaccggtggacgtcgacgggcgcgttggctcagcccaaatcggggtgggctaacctcaaggacttcacccacgtgccttacaacggcaagcaccttgtgtacgggagctactactctaacgcctacggctcaatgaacttcggcctcttctcggactggagcgagatgggctcggccagccagaaccagatgagccaggccgcggtcgcgcccacgctcttctacttctccccaaagaacatctgggtcctggcctaccagtggggtgccacccctttctcctaccgcacctcgaccgatccgaccaaccccaacggctggtccgctccccagccgctcttctcgggctccatctccgactcggacacgggccccatcgaccagaccctgatcggcgacgacaagaacatgtacctgttcttcgccggcgacaacggcaagatctaccgcgccagcatgccgctcggcaacttcccgggcaactttggctcggccgccaccgtcgtcctgagcggcgcccgctacgacctgttcgaggccgtgcaggtatacacggtcgtcggccagagctcgccgacctatctgatgatcgtcgagtccatcggcgcgcgcgggcgctacttccgctcctacacggccagccggctcgacggcgcctggacggcccaggcggccagcgagagccagccgttcgccggcgcggccaacagcggcgcctcctggaccagcgacatcagccacggcgacctcatccgcatcgacgccaaccacaccatgcccgtcgacccctgccgcctccagctgctctaccagggccgctccggcgacagcgccgactacaactccctcccctaccgcccgggcctgctcaccctgcagggcgcttcttccggcggcggcgacaacggcggcggcggcggcggcgtaaccgtcccccggtacggccagtgcggtggccagggctacacggggccgacaacgtgcgagagcccatacacgtgcaagtaccagaatgattgtaagtga

SEQ ID NO: 196 - protein, 370 aa, Myceliophthora thermophilia
MRLTKTDLSVALLASALPATQAACSLPSSYRWTSTGALAQPKSGWANLKDFTHVPYNGKHLVYGSYYSNAYGSMNFGLFSDWSEMGSASQNQMSQAAVAPTLFYFSPKNIWVLAYQWGATPFSYRTSTDPTNPNGWSAPQPLFSGSISDSDTGPIDQTLIGDDKNMYLFFAGDNGKIYRASMPLGNFPGNFGSAATVVLSGARYDLFEAVQVYTVVGQSSPTYLMIVESIGARGRYFRSYTASRLDGAWTAQAASESQPFAGAANSGASWTSDISHGDLIRIDANHTMPVDPCRLQLLYQGRSGDSADYNSLPYRPGLLTLQGASSGGGDNGGGGGGVTVPRYGQCGGQGYTGPTTCESPYTCKYQNDCK

SEQ ID NO: 197 - DNA, 543 bp, Myceliophthora thermophilia
  CDS (1)...(543)
tgcaccttcccccgacgtctcgaggacacgcccgcgtaccacaactggcccggtgagaacctggaggtcatctacggcgagggcatgtacatcgggtaccggcactacgaccgggtcggggtggcgccgctgttcccgttcgggcacgggctgtcgtacacgacgttcgagtacgggcggccgtcggtgagcccgaaggtgctcggcccggacgggggcgcgatcgagctggtggtggccatcagcaacgtcgggccggtccggggcctcgagacggtgcaggtgtacgtgcgggacgagcggagccggctgccgcgaccggaaaaggagctcgtcgcgttcgagaaggtcgagctcgagccgggcgagaccaagcacctgcgcatcccgctcgacaagtacgccgtcggctactacgacacggccctgcgccgctgggtggccgagcagggcaccttccgggccctggtcggtgcctcggccgcggatatcaagtatgatgtcgcgtttgaggtcaaggagacgtttacctgggttttctag

SEQ ID NO: 198 - protein, 180 aa, Myceliophthora thermophilia
CTFPRRLEDTPAYHNWPGENLEVIYGEGMYIGYRHYDRVGVAPLFPFGHGLSYTTFEYGRPSVSPKVLGPDGGAIELVVAISNVGPVRGLETVQVYVRDERSRLPRPEKELVAFEKVELEPGETKHLRIPLDKYAVGYYDTALRRWVAEQGTFRALVGASAADIKYDVAFEVKETFTWVF

SEQ ID NO: 199 - DNA, 2571 bp, Myceliophthora thermophilia
  CDS (1)...(2571)
atgtctgaggttaaaacatcacagaaatcgagtcaaggacctgagctccgcctcgaccatgtgcttgcctccatcctccatcgtcggtcatcgcggaatcagctacgacgcctgaccaccgttcctcatggcatggcggatttctcttccaacgcatacctgtccctctcctcgcagcccgccgtgcagcaggccttcctagcacggctccatgctgctgcttcgacacccggcagtaatggctcctcctccttgctcgggtcgggcggctcccggctgttggatggcaactcgtcgtacgcagaatccctcgaacgcaccatcgccgccttccaccgcgccccggccggcctgctcttcaactcggccatggacgctaacgtcggcctgttcggctgcgtcccacaaaagggcgacgccatcgtatacgacgagctaatccacgctagcgtgcatgacgggatgcgactcagcagggccggaaagaagatcccgtttgcgcacagctcggtatgggaggtgtcgcatccagatcctaacaagagtccattggagacggtgctgcgctctctgctccacggtcccgacggcggcctcttccgatcgggtgagcggaacgtcttcatcgccgtcgagggcatctacagtatggatggggacgttgctcccctgaccgagatcgtggactgcgtcgagcgctacctgcctcgacacaacggctatatcgtggtcgatgaagcccactcgacgggcataattggcgatcgcggccgtgggctcgtgtgcgaacaaggtctcgaaaaacgcgtctgggcgagagtccttggttttggcaaagcgatgagctgcaccggaggcattgtcctttgctcgtcaacaactcgcgaatacctcatcaattacgctcgaactctcatctacacgaccgccatggcgttccccacgctcgcgagcatcgagacggcgtacgactttcttgcaactggccaagcggagccactactcgacaacctccggctcctcatccaggaggcgcacaaactcttcgaggcactatgcacccgtgagaatgcgcccgcagaactgcttcgtgtcggcagggagaacccaaggtcacccatcatccccatcttcaccccccacgcccgaaccaagtacatcgtcccgggggggagatggcgcgacacggacggcaacctcgtcaacgcccatgcgggctgcgtaacggtcgacaaggataccggcaaattctggctctttggagagtacaaggtcgaaggccagactgaaggcggcggtgtttccgtctacagctcggatgacctggcgacgtgggaaagccacggccttgccttagctcccatcgagggccacccgtacatctcgccctcccacatcatccagcgaccaaaggtggtctacagcaaggtgtccaacgaatatcacatgtggtggcacgcagataactccacgtatggactgctgctccagggatttgctcggtcgccaaacatttcggggccttacaccttcgtgagcgccaccgcgcccctgggcaactggtcccaggatttcggcatctttaccgactacaaggacgggaggtcctacgcgctctactcgaacggcgacagccgggaaggccgagacgtgtatcttacggcctacaacgaggatgtgtcggcgctcgacaaggtcatccaccgcttcgacaagtacgatctcgaagccccgaccatcgtccagacggacaagagttactacgccatcatgagccacaagacgggctaccggcccaacaacgtggtcgccttccgggccgactcgctggccggtccgtggtcgcagcccttcatggtggcgccgcccaacacgcggaccttcaactcccagtcgggcttcaccttgaccatcaggggcaagaagaggacgacgtacttgtacctgggcgaccagtgggactccaactcgctctgggagagccggtacatctggcttccgatggagattgacgaccgcaagaagacactcaggctcgtgtggaacgacgtgtacgacttggacgtcaagacgggcgagtggtcccccgtccgaggcaagacatactacgcggccgacgccaagacggccggcaacgcgttcaagcaggaggccaacttcgccagcaagggtgtcatcgtcacgggcattcgcggcaacgacagcaccgttacttttgaagggatcgagggctccgggaagccgcagtgggtgtcgttctactaccagaacacggacgacatgggcttcggggaccaaccgggcgggacgccggaccggatcggcggcacgtggcagctgcgccggatcgcgagcgtcgtcgtaaacggtaacacggagaaggtcgagacgctgtaccagcgggacacgcacaagggcatcatcctctcgacgcctctgctgctgacgctggagaaggggaagaagaacaccatcaccgtgggcgggctgtggaacgggttcgattacaagggggcggatctggacagaatcgtcgtgtatccccccgaaacggaccgcaagaggcgataa

SEQ ID NO: 200 - protein, 856 aa, Myceliophthora thermophilia
MSEVKTSQKSSQGPELRLDHVLASILHRRSSRNQLRRLTTVPHGMADFSSNAYLSLSSQPAVQQAFLARLHAAASTPGSNGSSSLLGSGGSRLLDGNSSYAESLERTIAAFHRAPAGLLFNSAMDANVGLFGCVPQKGDAIVYDELIHASVHDGMRLSRAGKKIPFAHSSVWEVSHPDPNKSPLETVLRSLLHGPDGGLFRSGERNVFIAVEGIYSMDGDVAPLTEIVDCVERYLPRHNGYIVVDEAHSTGIIGDRGRGLVCEQGLEKRVWARVLGFGKAMSCTGGIVLCSSTTREYLINYARTLIYTTAMAFPTLASIETAYDFLATGQAEPLLDNLRLLIQEAHKLFEALCTRENAPAELLRVGRENPRSPIIPIFTPHARTKYIVPGGRWRDTDGNLVNAHAGCVTVDKDTGKFWLFGEYKVEGQTEGGGVSVYSSDDLATWESHGLALAPIEGHPYISPSHIIQRPKVVYSKVSNEYHMWWHADNSTYGLLLQGFARSPNISGPYTFVSATAPLGNWSQDFGIFTDYKDGRSYALYSNGDSREGRDVYLTAYNEDVSALDKVIHRFDKYDLEAPTIVQTDKSYYAIMSHKTGYRPNNVVAFRADSLAGPWSQPFMVAPPNTRTFNSQSGFTLTIRGKKRTTYLYLGDQWDSNSLWESRYIWLPMEIDDRKKTLRLVWNDVYDLDVKTGEWSPVRGKTYYAADAKTAGNAFKQEANFASKGVIVTGIRGNDSTVTFEGIEGSGKPQWVSFYYQNTDDMGFGDQPGGTPDRIGGTWQLRRIASVVVNGNTEKVETLYQRDTHKGIILSTPLLLTLEKGKKNTITVGGLWNGFDYKGADLDRIVVYPPETDRKRR

SEQ ID NO: 201 - DNA, 558 bp, Myceliophthora thermophilia
  CDS (1)...(558)
atgtattctctgctcattgccctcctctgcgccggcactgccgtcgacgcccaggctctccagcagcgacaggccgggacaactctcaccgtcgacctgtccacgacgtaccagaggatcgacgggttcggtacctcggaggccttccagcgcgcggtgcagatgagcaggctgcccgaggaaggacagcggcgcgctctcgacgtcctgtttagtaccaccaacggcgccgggctctccatccttcgcaacggcatcgggtcctcacccgacatgagctccgaccacatggtctcgatcgcgcccaagagccccggctcgcccaacaacccgctgatctactcctgggacggctccgacaacaagcagctgtgggtgtcgcaagaagccgttcacacgtacggcgtcaagaccatctacgccgacgcctggagcgccccgggatacatgaagaccaacggcaacgacgccaacggcggcaccctgtgcggcctcagcggtgcccagtgcgcgagcggcgactggaggcaggcatatgccgactacctcaccaagtga

SEQ ID NO: 202 - protein, 185 aa, Myceliophthora thermophilia
MYSLLIALLCAGTAVDAQALQQRQAGTTLTVDLSTTYQRIDGFGTSEAFQRAVQMSRLPEEGQRRALDVLFSTTNGAGLSILRNGIGSSPDMSSDHMVSIAPKSPGSPNNPLIYSWDGSDNKQLWVSQEAVHTYGVKTIYADAWSAPGYMKTNGNDANGGTLCGLSGAQCASGDWRQAYADYLTK

SEQ ID NO: 203 - DNA, 1959 bp, Myceliophthora thermophilia
  CDS (1)...(1959)
atggcaggcctcgttgcccagctccaggaccacctcccatccgtaaacggatctggcctcgtcacgcccgccatgcacgctctctcgtcgctcgctgtcctcggcgcctgggccgtccagacggtcttgggccgtccggccaccctctcaaagcgggccaccgactccttcatcgagaccgagacgcctatcgcatgggaaaagctgcggtgcaacatcggcgctaacggctgtgcggcttccggagccgctgccggtgtggtcattgccagcccgtccaagtcggatccagactacttctacacctggactcgagatgccggcctggtcctgacgggtatcgtggacgccctgtcccaaaactactcggcggccctgcagaccaacattcaggactacatcatcgcccaggccaagctccagggtgtttcgaacccctccggtagcctctcggacggcaccggtcttggcgagcccaagttcaatgtcgatctcacccagttcacgggcgactggggccggccgcagcgcgacggtccgcctctccgggccatcgccctcatccgctacgccaagtggctggcttccaacggttacaaggacacggccaacagcgtcgtctggcccgtcatcaagaacgacctggcctatgccgctcagtattggaacgagactggtttcgacctgtgggaggaggttcccggcagctcgttcttcaccattgccagcacgcaccgagccttggtagagggagctgccctcgctgcccagctcggcaccgaatgcagcgcctgcatcaccgtcgcgccccaagtcctctgcttccagcagagcttctggaacccgtcgggcggttacgttgtctcgaacatcaacggcggcaacaaccggtccggcaaggatctcaactcggtcctggcctccatccacacctttgacccggcggtcggctgcgactcggtcaccttccagccctgcagcgacaaggcgctctccaaccacaaggcctacgtcgactccttccgcagcgtctacgccatcaactcgggcattgcccagggcaaggccgtcgccgtgggccgctactcggaggacgtctactacaacggcaacccgtggtacctggccaacttcgcggccgccgagcagctctacgacgccgtcttcgtctggaagaagcagcagtccatcgaggtcacccagctgtccctccccttcttcaaggacctgctccccggcatctccaccggcacctacaccccgtcgtcgtcgacgtaccagcagatcctcgacgccgtctcggcctacgccgacggcttcatcgacgtcgcggccaagtacaccccctcggacggctccctggccgagcagtacacgcgcgactcgggccagccgatctcggccaaggacctgacctggtcctacgccgccttcctctcggccgccgaccgccgcgcgggcatcgtcccggccggctggtccgccgagcacggcaagacgctgcccggctcgtgctcggccgtccaggtcgccggcacctacacccaggccaccgccacctccttcccgcccggccagacgcccaacccgaccagcgacaccccggccccgttccccacggcctgcgccgactccacccaggtcttcgtcaccttccgcgccgaggtgaccacccagtggggccagtcggtcaaggtcgtcggcagctcgtccgagctcggcaactgggacgtctccaaggccccgcgcctgtccgcgtcggcctacacggcgtcggacccgctctgggccatcacggtgcccatgaaggccggccagtcggtgcagtacaagttcgtcaaggtcaacggggacgggtcgatccagtgggagtcggacccgaaccgccagttcacggtcagctcttcctccacggccagcggctgtgcctggcagaccatcgaggcgacctggcggtag

SEQ ID NO: 204 - protein, 652 aa, Myceliophthora thermophilia
MAGLVAQLQDHLPSVNGSGLVTPAMHALSSLAVLGAWAVQTVLGRPATLSKRATDSFIETETPIAWEKLRCNIGANGCAASGAAAGVVIASPSKSDPDYFYTWTRDAGLVLTGIVDALSQNYSAALQTNIQDYIIAQAKLQGVSNPSGSLSDGTGLGEPKFNVDLTQFTGDWGRPQRDGPPLRAIALIRYAKWLASNGYKDTANSVVWPVIKNDLAYAAQYWNETGFDLWEEVPGSSFFTIASTHRALVEGAALAAQLGTECSACITVAPQVLCFQQSFWNPSGGYVVSNINGGNNRSGKDLNSVLASIHTFDPAVGCDSVTFQPCSDKALSNHKAYVDSFRSVYAINSGIAQGKAVAVGRYSEDVYYNGNPWYLANFAAAEQLYDAVFVWKKQQSIEVTQLSLPFFKDLLPGISTGTYTPSSSTYQQILDAVSAYADGFIDVAAKYTPSDGSLAEQYTRDSGQPISAKDLTWSYAAFLSAADRRAGIVPAGWSAEHGKTLPGSCSAVQVAGTYTQATATSFPPGQTPNPTSDTPAPFPTACADSTQVFVTFRAEVTTQWGQSVKVVGSSSELGNWDVSKAPRLSASAYTASDPLWAITVPMKAGQSVQYKFVKVNGDGSIQWESDPNRQFTVSSSSTASGCAWQTIEATWR

SEQ ID NO: 205 - DNA, 2022 bp, Myceliophthora thermophilia
  CDS (1)...(2022)
atgaggatgcggagcttactggtgctcgcggccatcggcctggccgctgccgaggacggcctcaacggctggcttcgctatgcgcggatcaagggagcacgcgatttccacgacaggctgccgtctaccattgtcgcactcaacgccaccgaggggctccccgtctacacggccggccaggagctcgcccagggcatcgagggcatcttcggcaagaaggtcgacctcgacgtcgacctcgcaacggccggcgccggcaagagtaacggcaagggcaagggcaatggcaagggcaaaggaaagggcaacaacggccacggccacgaccgcgacaccaccgccacggttgggacggtcgcggcgtatgtcgacagcaaccccggcgctgctgccgccggcatccccgagctggccgacgacggcttctacctccgggtctcgcgcggtaacgtcctgatcctcggccagaacgagcgcggcgccctgtacggcgccttccactacctctcgctgctcgcgcagggcaacgcatccgactacacgctggcgtccaacccggacgcgccgatccggtgggtgaaccagtgggacaacatgcaggacggcggcacccacggcagcgtcgagcgcggctacgggggcgactccatcttcttctgggacggcaaggtccgcgacgacctgacccgggccggactctacgcccgcctgctcgcctccatcggcgtcaacgcggtcgtcgtcaacaacgtcaacgccgaccccaagacgctgacgcccgagaacatggacggcctggcccgcatcgccaacgccttccggccctacggcgtccagctgggcgtctcgctcaacttcgcctcgccccagaccctcggcggactcgacagcttcgaccccctggacgagcgagtggtggagtggtggcgggacatcaccgacgccctctacgagcggatccccgacatggccggctacctggtcaaggccagctcggagggccagcccggccccttgacgtacaaccggacgctcgccgacggcgccaacctgttcgcgcgcgccctcaagccgcacggcggccgcgtcctgttccgcgccttcgtctacgaccacaccagcctggacgaggacaaggactggaaggcggaccgggccaaggcggcggtcgagtacttcgacggcctcgacggcaagttcgaggacaacgtggtgatccagatcaagtacggccccatcgacttccaggtgcgcgagcccgcgtcccccctcttctcgcgcctggtccgcaccgcctccgccctcgagctgcagatcacgcaggaatacctcggccagcaggcccacctcgtctacctggcgcccatgtggaaggagatcctcgacttcgacttccgcgtcgacggccggccctcgcgcaccgccgacatcctcaacggcaagcgcttcggccgccgccgcgcgggcggctacgccggcgtcgccaacgtcggcaccaacacgacctggctgggcagccacctggccatgtccaacctgtacgccttcggccgcctcgcctgggacccgtcgtccgagcccgagagcgtcctccgcgactggatccggctgaccttcggcgacgacccgaaggtgctcgacgtcatcacgcgcatgtcgatggcctcgtggccggcctacgagaactacagcggcaacctgggcatccagacgctgaccgacatcctgctgggccactacggcccgaacccggcctcgcaggacggcaacccgtggggccagtggacgcgcgccgacgccgacagcatcggcatggaccgcaccgtctggaacggcaccggcttctcgggccagtacccgcccgaggtcgcggcccggttcgagaggatcgagacgacgccggacgagctgctgctctggttccaccacgtcccctacacgcacgtcctcaagtccggcaagacggtcatccagcacttctacgacgcccactccatcctgccgctgggcattgtcgactaa

SEQ ID NO: 206 - protein, 673 aa, Myceliophthora thermophilia
MRMRSLLVLAAIGLAAAEDGLNGWLRYARIKGARDFHDRLPSTIVALNATEGLPVYTAGQELAQGIEGIFGKKVDLDVDLATAGAGKSNGKGKGNGKGKGKGNNGHGHDRDTTATVGTVAAYVDSNPGAAAAGIPELADDGFYLRVSRGNVLILGQNERGALYGAFHYLSLLAQGNASDYTLASNPDAPIRWVNQWDNMQDGGTHGSVERGYGGDSIFFWDGKVRDDLTRAGLYARLLASIGVNAVVVNNVNADPKTLTPENMDGLARIANAFRPYGVQLGVSLNFASPQTLGGLDSFDPLDERVVEWWRDITDALYERIPDMAGYLVKASSEGQPGPLTYNRTLADGANLFARALKPHGGRVLFRAFVYDHTSLDEDKDWKADRAKAAVEYFDGLDGKFEDNVVIQIKYGPIDFQVREPASPLFSRLVRTASALELQITQEYLGQQAHLVYLAPMWKEILDFDFRVDGRPSRTADILNGKRFGRRRAGGYAGVANVGTNTTWLGSHLAMSNLYAFGRLAWDPSSEPESVLRDWIRLTFGDDPKVLDVITRMSMASWPAYENYSGNLGIQTLTDILLGHYGPNPASQDGNPWGQWTRADADSIGMDRTVWNGTGFSGQYPPEVAARFERIETTPDELLLWFHHVPYTHVLKSGKTVIQHFYDAHSILPLGIVD

SEQ ID NO: 207 - DNA, 2715 bp, Myceliophthora thermophilia
  CDS (1)...(2715)
atggcaacaagtcctgccgtcaatgtctactggggacagaagggctcggcctcagacagactcagcaccttttgtgacgcctccagcttcgagtatgtcacagtcggcttcatcaacaagtctcccgagaaagactcctccgcgttgaggtatccgggcagtgacttttccgtccactgcatgaacgccgccaagtaccaagacgccaagggagtcgactcgaacctcctcagcaagtgcggccagatcgccgccgatgttcggtattgccagaagaagggcaagaaggtgctcctctccatcggcggtgaatggaacccgcccaagacggactacagcatctctagcccgcccgagggagagtattttgccgacttcatctggggcgccttcggcccgtacaccgcgagctggggagacaaaccgagacctttcgatgactttttcaacgccgacgagggcgaagagcactttgtttttgatggctttgactttgatatcgagcacaagttcacggaccaaagcggttatgtcgccatgatcagaaggctgcgtgccctgacccagctggacacgaccaagcagtatctgatcaccgccgccccggagtgccccctggacgcggatctcttcaagatgaagaccatcattgacacttgtcaattcgatgccctctttgtccagttctacaacaaccccatctgcgccggagttgacaataacaactttgacgactgggcggcctacctcgccaagacccccagcaagaacgcaaagatcttcatcggcctgcctggttctccagacgctgccggctctggctacctagcccctgcatctgcacttcagttgatcaacaagcataagaacaagccggcctttggtggtgtcatggtctgggatgccttctatggtagccagaagtttggcggcaccccattctacgacttgctgcatgattttgcctgcggtgccccgtcccacaccacgactgccccggccccgacggcgacggccactgtttgcgtcaggtggcacacggttgtcagcggtgacacttgctacgagattgccggctcctacggcattaccctggacgacctgtacaagttcaacccgggcattacctgtgacctccaaatcggcgaccaggtctgcgtgaggttcggcgtcccaccccctacaagcagctcgaccagcctctccccctcagccagcactagcacatctgctagcagtagcagtttgacaagaaccaaaacccaggctagtattagcacggcttctagcaccagcaggtcgaccagctcgacgaaaaactcgaccatctcgaccagaacctcgactatctcgaccagaacctcgactatctcgaccagaacctcgactatctcgaccagaacctcgactatctcgaccagaaccttgacaagctcaatcaaaccctcggctagctcaacgaaaacctcggccggctcaactaagagctcgactagttcgactagaacctcgaccagctcagccaagccctcgacaagctcaatcataacctcgaccagctcgactcgtacctcggctaggtcaactaaaggctcggctagctcgaccagagtctcgactagtctcagcccgtcaactagctcgaccagcgtgaccagcgcgaccagcatcaacagctcgagtggcaccagctcctcaacaggcactagcatttcaagcagcctcagcacgccctccacctcgacgtcaactgaggttagcttgactttggttacggagactagttcgaccgagagtcaagctcccagtaagacagctggggattcctccaccatcacctcggcatctggagtcactttgacaacgtccagcggtgcggctacaagtacctcgaccgacgtcgatgactcgtgcccagatgaggagaccagcacgtcaactaccgcgacctttactgggtctgccacccagtcggccaccgagactaccaccgagactgccaccgtcacatccaccccgggatccacttataccagcggcgaggagactaccagcacctcgaccgaggatgatgagactagcacctctgctgttgtgtccgctacccagaccgccacatcgcctggggccaccatcaccggatcgtcggcctcggacattagcgccactgcaagcagcaccgcctccgagggctggacaacgtctaccatctactcgaccaccacctacaccatcactagctgcccggttaccgtgaccgactgccccggcaagatcggccaggtcacgaccgagacgatcgccatcagcacgaccgtatgccccatcaccgaggggactggcccgtcaacctcggcctcctcgcctccggcgccggtcgagtcgggcagtggtgccaaacctcctcccctgcctaccggcagggagggcgaggacacggactcgacatcgaccacgcgggttaccacaacacgcttcactaccctgacggtgcccaagccagaggccacgggcgcagcggctaacccctcgtcgtcgtcgtcgtcgtcgtcgtcgtcgtcgtcatggtccccgtcggccggcctccccaccaagtcgggctccccgcccccgccgtcgacgacgaccatccccgtgtttgcgggtgccggccgcaacaccgtcacgcttggtgtgccggctgttctggctgtcgttctcgtcctcgctatttaa

SEQ ID NO: 208 - protein, 904 aa, Myceliophthora thermophilia
MATSPAVNVYWGQKGSASDRLSTFCDASSFEYVTVGFINKSPEKDSSALRYPGSDFSVHCMNAAKYQDAKGVDSNLLSKCGQIAADVRYCQKKGKKVLLSIGGEWNPPKTDYSISSPPEGEYFADFIWGAFGPYTASWGDKPRPFDDFFNADEGEEHFVFDGFDFDIEHKFTDQSGYVAMIRRLRALTQLDTTKQYLITAAPECPLDADLFKMKTIIDTCQFDALFVQFYNNPICAGVDNNNFDDWAAYLAKTPSKNAKIFIGLPGSPDAAGSGYLAPASALQLINKHKNKPAFGGVMVWDAFYGSQKFGGTPFYDLLHDFACGAPSHTTTAPAPTATATVCVRWHTVVSGDTCYEIAGSYGITLDDLYKFNPGITCDLQIGDQVCVRFGVPPPTSSSTSLSPSASTSTSASSSSLTRTKTQASISTASSTSRSTSSTKNSTISTRTSTISTRTSTISTRTSTISTRTSTISTRTLTSSIKPSASSTKTSAGSTKSSTSSTRTSTSSAKPSTSSIITSTSSTRTSARSTKGSASSTRVSTSLSPSTSSTSVTSATSINSSSGTSSSTGTSISSSLSTPSTSTSTEVSLTLVTETSSTESQAPSKTAGDSSTITSASGVTLTTSSGAATSTSTDVDDSCPDEETSTSTTATFTGSATQSATETTTETATVTSTPGSTYTSGEETTSTSTEDDETSTSAVVSATQTATSPGATITGSSASDISATASSTASEGWTTSTIYSTTTYTITSCPVTVTDCPGKIGQVTTETIAISTTVCPITEGTGPSTSASSPPAPVESGSGAKPPPLPTGREGEDTDSTSTTRVTTTRFTTLTVPKPEATGAAANPSSSSSSSSSSSSWSPSAGLPTKSGSPPPPSTTTIPVFAGAGRNTVTLGVPAVLAVVLVLAI

SEQ ID NO: 209 - DNA, 2460 bp, Myceliophthora thermophilia
  CDS (1)...(2460)
atggacgacgatgaatacggtgatgcctacgatgtgcttgtagcgctcgccacgcaagccggcccctcgagagcgcctcaacaaccgcaaccacaggccgccccgaggattcagcagccgacaccgcagcgcctcgaccgagccccgccagcgaaccggacctcctccggctcaggcccgcccaaggttgtgcaacctgctccgcaggccttgcccgctcgcggttctggatccaccattctcgtctcgccgcggcagaagggcaacccggtgctagcctgcctgaagtcggtcccatgggaatacagcgacataccggccgactacgggctcgggttgaccacctgcgctctgttcctcagcctcaagtaccaccgcctgcatccggaatacatctacacgcgcatccggaacctgcggggcaagtacaacctgcgcatcctgctcacgctcgttgacattcccaaccacgaggacgcgctgcgggagctttccaagacgtccctggtcaatgacgtgaccgtcatcctggcctggtctgccgccgaggccgcccgctacctggaactctacaagtcgtacgagcacgccggcttcgccgccatccgcggccagcaggcgacgagctacgcggagcgccttgtcgagttcgtcaccgtgccgcgcaacgtcaacaaggccgacgccgtcgccctcgtcagcgcgttcggcagcctccgccacgccgtcaacgccgaccccgagcagatcggcgtcgtcggcggctggggcgagaagaaggtgcgcgcctggtgccgggccgtgagggagccgtttcgggtacagaaggcggggaggagaagaggcggagctggggttggaactggggttggggcgcgtgctgctagcggcaagggagcgttgggagaggggtcgaccggaaggaaagaggaggatgagattgaggctgggacagaggctgcagtcgcggagagcagagtggacgccgaggctgcttcgaggaatgggcggccggatccgaccgtgcctgtccgaaccccgtcagtcactgccacgtcttcgtcagcagcggcgccagcacgcaaggacgacgagctgagcgacggtgtggccgccgcaaatggatggggtgcgagcgctgtcgacgcgctcagcacggcgctggtcatggagaactgggatgtcgtgaaccagatattggagtacatcccaaccatcaacttcgacaacaccaccaccgaagtgtccctgttcgagaccacgattcgatatctcggtggactggtgtccgcctacgacatcataaccaacagcctcagtctgggcatccaaaaacagccggacgtagaagccatcctgactcaggcgaagcggctggccgacaaccttaaagttgccttcgacacgcccagcggcgttccggacaacagcctctacttcaacccaccacggaagggcggatcaacgacgaacggcctcgccaccaccggcaccttgatccttgagtggacacgcctcagcgacctgaccggggactctgaatatgcggagctgacgcaaaaggcggagtcctacctgctgcaccccgagccggcgctgggcgagccatttcccggcctgctggggactaacattcgaatcgaggacgggaagtttgaagacggcaacggcagctggggcggcggaaccgacagcttctatgagtatctcatcaagatgtatatttacgaccccgagcggtttgccgagtaccgcgaccgctggatcgccgcggccgactcgtccattaagtacctcgtctcgcacccgaccacgaggccggagctgacgttcctcgctctgtggcggggcaaggagctgcggttctcatctcagcatttggcctgcttccacggcggcaacttcatacttggcggcctcacgctcggcgaacaggcgtacacggatctcgggctcgcgctcgtcgaaggctgccacgcgacgtacgtgggcacggcgacgggaatcgggccggaagtcttcgcttggcaggactcgcagctgccgctcaacgcgagcaataaccagccgcctccagaggaccagaccgctttctacgagaagtcgggtttctggatcaccaacggccattacgtgctgcggcccgaggtcatcgaaagctactactacgcctaccgcgcaaccggcgacaccaagtaccaggactgggcctgggacgcattccagaggatcaacaagacatgccgcgtggggagcggattctcgagcatcaaggacgtgaatgctccagacgggggcggattcgacgacttccaggagagcttctggtttgccgaggtgctcaagtatagctatctgatccatgccgaggatgctccgtggcaggtcaaggccgataacacgaacgagtacgtgtggaacaccgaggcgcatccgatacgggtggctggagggaaataa

SEQ ID NO: 210 - protein, 819 aa, Myceliophthora thermophilia
MDDDEYGDAYDVLVALATQAGPSRAPQQPQPQAAPRIQQPTPQRLDRAPPANRTSSGSGPPKVVQPAPQALPARGSGSTILVSPRQKGNPVLACLKSVPWEYSDIPADYGLGLTTCALFLSLKYHRLHPEYIYTRIRNLRGKYNLRILLTLVDIPNHEDALRELSKTSLVNDVTVILAWSAAEAARYLELYKSYEHAGFAAIRGQQATSYAERLVEFVTVPRNVNKADAVALVSAFGSLRHAVNADPEQIGVVGGWGEKKVRAWCRAVREPFRVQKAGRRRGGAGVGTGVGARAASGKGALGEGSTGRKEEDEIEAGTEAAVAESRVDAEAASRNGRPDPTVPVRTPSVTATSSSAAAPARKDDELSDGVAAANGWGASAVDALSTALVMENWDVVNQILEYIPTINFDNTTTEVSLFETTIRYLGGLVSAYDIITNSLSLGIQKQPDVEAILTQAKRLADNLKVAFDTPSGVPDNSLYFNPPRKGGSTTNGLATTGTLILEWTRLSDLTGDSEYAELTQKAESYLLHPEPALGEPFPGLLGTNIRIEDGKFEDGNGSWGGGTDSFYEYLIKMYIYDPERFAEYRDRWIAAADSSIKYLVSHPTTRPELTFLALWRGKELRFSSQHLACFHGGNFILGGLTLGEQAYTDLGLALVEGCHATYVGTATGIGPEVFAWQDSQLPLNASNNQPPPEDQTAFYEKSGFWITNGHYVLRPEVIESYYYAYRATGDTKYQDWAWDAFQRINKTCRVGSGFSSIKDVNAPDGGGFDDFQESFWFAEVLKYSYLIHAEDAPWQVKADNTNEYVWNTEAHPIRVAGGK

SEQ ID NO: 211 - DNA, 648 bp, Myceliophthora thermophilia
  CDS (1)...(648)
atggactttgaacaaccgccgcaaaccagagatccacagcgagggctggtggcgcccgattcaggacgcaaagtgtttgctcactacctcgtcggccttacttgcaaccagccgccggagcgctgggttcaagacattgctgcagctcagcgggctggtatagatgggtttgcgctcaacattggtccttcggacccctggaactgcacgcagctcgaccatgcttacagggcagccgaacgcagcggaggtttctttctgttcatttccttcgacatggcggctgggagctggtcagtgcctcatgtggttagcctgatcaagcgataccagggatcgtctgcgcagatgaaggtagagggaagaccacttgtgtcgaccttcgaaggtcccgactgggcccccaactggccgaccgtgcgtcgcgagacgggtggcatatgtctcataccagactggtctagtctaggcccgcaaggggtcggccagcggctagatctgatcgacggtgctttctcctgggacgcctggcccaagccgggacaatccaagatgactctcgtcgaggaccttttgtacatgaagagcctccaagggaagaagtacatgatgggcgttagcccatggttctacacaggcaagtattaa

SEQ ID NO: 212 - protein, 215 aa, Myceliophthora thermophilia
MDFEQPPQTRDPQRGLVAPDSGRKVFAHYLVGLTCNQPPERWVQDIAAAQRAGIDGFALNIGPSDPWNCTQLDHAYRAAERSGGFFLFISFDMAAGSWSVPHVVSLIKRYQGSSAQMKVEGRPLVSTFEGPDWAPNWPTVRRETGGICLIPDWSSLGPQGVGQRLDLIDGAFSWDAWPKPGQSKMTLVEDLLYMKSLQGKKYMMGVSPWFYTGKY

SEQ ID NO: 213 - DNA, 1455 bp, Myceliophthora thermophilia
  CDS (1)...(1455)
atgcacctcaccggaaccttcctcacggtggcggcagccatgagcggcgccgccgcagcccccagtgagaggcctatcgaagcacgccaagcaaacactatcacggtcgacctctcccagacgtaccagcgcatggatggattcggcttcagcctggcgttccagcgggcgaacttgatcaccaacatgtcggacaagaccaagcagcgagagctgctcgacctgctcttcaaccggacgacgggggccggcttcagcatcctgcggaatggcattgggtcgtcgcccaacagcaactcggacttcatgaacaccatcgcgcccaacaacccggggagccccaacgcggagccccagtacatgtgggacggcaaggacagcgggcagctgtgggtgtcgcagcaggcagtgaacttgtatggggtcaagaatatctacgccgacgcctggagcgctccggggtacatgaagaccaacgggcgcgacaccaacggcggcaccctctgcggggtgccgggagcgcagtgtgcgtccggcgactggcggcaggcgtacgccaactatctggtggcctacattggcttctacgcggaggaaggcgttaacatcacgcacctggggttcctcaacgagccggactacagcgccagctacgcgtcaatgcaatccaacggcaaccaggcggccgacttcatcaagatcctgcacccaacactcgaggccgtagggcttggggaccgggtacggatcgtgtgctgcgactcaatgggctggaacaaccaggtgagcatggtctcgcagatccggtcggccggcgccgaggacctgctggggaccgtgacctcgcacacgtattcggggggcccgggcgggccgatgagctcgcgggctcccgtctggctgtcggagcagtgcgacctcaacggggcctggaccacggcctggtactcgtacggcggcgcgggcgaggggctgacgtgggccagtaacatctacaacgcggtcgtcaacgccaacatctcgggctacctgtactgggagggtgtccagtggcctaacccaaacaccaatgagaagctcatccgcgtggacaacacgaccaacacgtacgaagtgtcgagcaggctgtgggcttttgccaactggtcacgctacgtgcggcccggggctgtgcgggtgggggtcagcggcggggggaatggactgcgcacggcggccttcagaaacgaagacggcacgattgcggtcattgccatcagctcgggggggtcggcggcgaacgtgagcatcaagatctctggaggccccggcgcagccgcggtgcaggcgtttgtgtctgacaacacgagaaaatgcgagtctacgccggcgacggtggcaggtgatggaaccatctcagggtcagtcgcagccagatcaatcacgaccttctttatcttgccggagagctcctga

SEQ ID NO: 214 - protein, 484 aa, Myceliophthora thermophilia
MHLTGTFLTVAAAMSGAAAAPSERPIEARQANTITVDLSQTYQRMDGFGFSLAFQRANLITNMSDKTKQRELLDLLFNRTTGAGFSILRNGIGSSPNSNSDFMNTIAPNNPGSPNAEPQYMWDGKDSGQLWVSQQAVNLYGVKNIYADAWSAPGYMKTNGRDTNGGTLCGVPGAQCASGDWRQAYANYLVAYIGFYAEEGVNITHLGFLNEPDYSASYASMQSNGNQAADFIKILHPTLEAVGLGDRVRIVCCDSMGWNNQVSMVSQIRSAGAEDLLGTVTSHTYSGGPGGPMSSRAPVWLSEQCDLNGAWTTAWYSYGGAGEGLTWASNIYNAVVNANISGYLYWEGVQWPNPNTNEKLIRVDNTTNTYEVSSRLWAFANWSRYVRPGAVRVGVSGGGNGLRTAAFRNEDGTIAVIAISSGGSAANVSIKISGGPGAAAVQAFVSDNTRKCESTPATVAGDGTISGSVAARSITTFFILPESS

SEQ ID NO: 215 - DNA, 1482 bp, Myceliophthora thermophilia
  CDS (1)...(1482)
atgaccgagggcaacgacgaccaggggttctggggcatggccgtcatgtcggccgcggagctcaacttcgatgatccgccgcacggcagaccgcaatggttggcgctcgcccaggccgtcttcaacactcaggccgctcgatgggaggaacgggattgcggaggcggcttgcggtggcagatcttcccctggaacaacgggtacgactataagaactccatctcccaggcctgcttcttcaacatcgccgcccgtctcgctctgtacactggcaaccagtcgtacgcggactgggccgaccgggtctgggattggatggcgaccacgaagctccttaacccggaaacataccacatctacgacggcgttcacgtcgagaactgctccaggattaccccttaccagtggacctacaacgccggcgcgatgctgctgggcgcggcggcgctctacaaccacagcgcgagcgccgcccggcgcgagacgtggcgcgagcgagtcgacggcctgctgaacggctccctcatcttcttcacgggcgagaacggcgacatcatgaccgaggtcgcgtgcgagcccgtagacctctgcgacctcgaccagcagagcttcaaggcgtacctctcgcgctggatggcggccaccatcaagtgggcgccctggacgaaccgccgcgtcaagcccctgctggcctcgtccgctgccgccgccgtggcaacctgcaccggcggcgacaacgggcgcatgtgcggtcttaaatggaacacgcgccggtgggacggcaccacaggggtcgggcagcagatggccgccatggaggtcgtcttggcaaacgcgatcgagcactcgcggccgcccgtgacggaccggaacggcggcacgagcgtcggcgacccgggggcgggcagcgcggacgtcggccgcaagacgccggaggagtactcctcggtctcgactgcggagaagaccggggcgtacatccttaccgtgctgttcgtgatcggcgtgatcgccgggagcctgtttgccttggatgacgagtacaaccgctcgtccgtgccggaacggcttgcgcggctccgcgcggtggtggtcagcggtgtccgcagctggagctgcagtgtcctttcgctcttttggcaacggggcggccgcggccaagcgaagggaaagtgggtaggccggtccgagagcaacgagcaacaaggggtagcatcgtacctcctcttcgccggcgtcgccttcgtcgccctcaagaccagcctgtccgtcgtcgacagctaccgcttcgaacgccgccggcgcgccctgggctgcggcaccttcgcccttacccagatcgccgacgccgtcttcaagttcttcaacgtgttccgtgccatcgaggcccgggacgacaagccttataggcagcagacaaacttgaccatttcctttccagatggatgcctcgtcagtgtggtgcgagacaagcgtgattag

SEQ ID NO: 216 - protein, 493 aa, Myceliophthora thermophilia
MTEGNDDQGFWGMAVMSAAELNFDDPPHGRPQWLALAQAVFNTQAARWEERDCGGGLRWQIFPWNNGYDYKNSISQACFFNIAARLALYTGNQSYADWADRVWDWMATTKLLNPETYHIYDGVHVENCSRITPYQWTYNAGAMLLGAAALYNHSASAARRETWRERVDGLLNGSLIFFTGENGDIMTEVACEPVDLCDLDQQSFKAYLSRWMAATIKWAPWTNRRVKPLLASSAAAAVATCTGGDNGRMCGLKWNTRRWDGTTGVGQQMAAMEVVLANAIEHSRPPVTDRNGGTSVGDPGAGSADVGRKTPEEYSSVSTAEKTGAYILTVLFVIGVIAGSLFALDDEYNRSSVPERLARLRAVVVSGVRSWSCSVLSLFWQRGGRGQAKGKWVGRSESNEQQGVASYLLFAGVAFVALKTSLSVVDSYRFERRRRALGCGTFALTQIADAVFKFFNVFRAIEARDDKPYRQQTNLTISFPDGCLVSVVRDKRD

SEQ ID NO: 217 - DNA, 1845 bp, Myceliophthora thermophilia
  CDS (1)...(1845)
atgatcggcactcgtctcgcaggcctcggcctgcttgtagctggcgtttgctccgcttctgccagcacgtcggcaattgagctacgctctgctgaacgacccttgagcgagtgtcccggataccaagcggtcaacgtcaagaccagtgccacaggtctcactgccgacctgagactcgccgggagtccctgcaacacctacgggactgacttggagaagcttcgcctggaagtcacctacgagactgaaaaccgtcttcacgtcaaaatcagggacgccgacgagctggtctaccaagtgccagagagtgtcttcccgcgtcccaaggccgacggcataagcgcaaagaagtcggcgctcacgttcaagtacaaggccaaccccttctccttctcggtctcgcggaccaagacgggggaggtcctgttcgacacctcggccgctcccctcgtcttccaatcggaatacctccgcctgaggaccaagctgccggagaacccgaacctctacgggctcggcgagcacagtgacccgtttcggttgaacacgaccaactacatccgcaccctctggagccaggacagctatagcacgccagaaggggccaacttgtacgggaaccacccggtgtactttgagcaccgcaagagcggaacgcacggcgtgttcttcctcaactcgaacgggatggacatcaagattgacaagaatccccaacatctcgagtacaacacgctaggcggcgtcttcgacttttactttgtggccggcccgagccccgtcgacgtcgcgcggcagtacgccgagatcagcggactgcctgcccctgttccgtactggtcctttggcttccacaactgccgttatggataccgggacgtatatgacgttgcggagatgatatacaactacagtgccgcgcgcattcctctcgagacgagctggatagacattgattatatggaccggagaagggtcttcactaacgatccggaaaggttcccgatgcctctcctgcggatgcttgcggacaaacttcactccaacaaccagcacttgattgtgatggtcgaccctgcggtctcgtactcgccgaaccccgcgtatcagcgcggcatcgaggacaacgtctttctcaagcgcagcaatggctcggaatggctgggtgtcgtgtggcccggcgtcaccgtgtttcccgactggttctcggccaatatcaccaggtattggaacaacgagtttgcccagttcttctccaaggaaactggcctcgacattgacgggctctggatcgacatgaatgagccgtccaacttcccctgcttcttcccctgcgacgaccccttctcggccgcggtaggatatcccccggacccgccccccgtgcggcccgctgcaccacgcccgctgcctgggtggccgtgcgaattccaacccgagggttccaactgcactcaacaacaggaggaggctacgccatcagtcagccttccacggcacggaattgagccaaggacagcgccgatcgccaatccgcctcgcggcgacaacaagtggaaaggccttcctggccgcgacctgctcttccccaagtactcgatccacaacaaggcagcgtacaaggattcgtggaacggaaagcacggcggactctcgaacaagaccgtcaacaccgatgtcatccatgcgaacggcctggccgaatacgatgtccacaacctatacggcaccagtaagaagaactctccccacgtctcgcttcaccgtcacctcatctccccaacccccttgtcccccaaccctgacataataatgacttccacctcgatagctggcggagactaa

SEQ ID NO: 218 - protein, 614 aa, Myceliophthora thermophilia
MIGTRLAGLGLLVAGVCSASASTSAIELRSAERPLSECPGYQAVNVKTSATGLTADLRLAGSPCNTYGTDLEKLRLEVTYETENRLHVKIRDADELVYQVPESVFPRPKADGISAKKSALTFKYKANPFSFSVSRTKTGEVLFDTSAAPLVFQSEYLRLRTKLPENPNLYGLGEHSDPFRLNTTNYIRTLWSQDSYSTPEGANLYGNHPVYFEHRKSGTHGVFFLNSNGMDIKIDKNPQHLEYNTLGGVFDFYFVAGPSPVDVARQYAEISGLPAPVPYWSFGFHNCRYGYRDVYDVAEMIYNYSAARIPLETSWIDIDYMDRRRVFTNDPERFPMPLLRMLADKLHSNNQHLIVMVDPAVSYSPNPAYQRGIEDNVFLKRSNGSEWLGVVWPGVTVFPDWFSANITRYWNNEFAQFFSKETGLDIDGLWIDMNEPSNFPCFFPCDDPFSAAVGYPPDPPPVRPAAPRPLPGWPCEFQPEGSNCTQQQEEATPSVSLPRHGIEPRTAPIANPPRGDNKWKGLPGRDLLFPKYSIHNKAAYKDSWNGKHGGLSNKTVNTDVIHANGLAEYDVHNLYGTSKKNSPHVSLHRHLISPTPLSPNPDIIMTSTSIAGGD

SEQ ID NO: 219 - DNA, 1233 bp, Myceliophthora thermophilia
  CDS (1)...(1233)
atggccaaggactcggtccgccatctcgccgccgttctcgccgcggccgccttggtcgcggtggcccggggcggtaatagtaataataacaataataataatcccctgacaacggactcggactgccaatgctacaaaaccaacgggacggcagccagctacttctcacaccaccggttcttcgactttggctcgctccaccggtacgtcaatgtcacgaaaccgattgacgactttcgggccaacgccgaggcgccgcccacgagctcctacttcctgcgccccgagttcgccgacacgtgggacattcagaggtgggacaacacggagctcatggcgctgaacgacgagacgatcaacgacgcgaccatcaagatggtcaacagccccaacaacatctacatcgagcacgacgacgacgacgacgacgacgacgacgggcaggcgacgcacctgacgctgcggacggtccggcacgcggccgggttccagtctgcggccgagatcgagtcgctcagcaaggggttccgctacctctcggtgcggatgcgggcgcgcacgaggggggcccgcggggcggtgacggccatgttcacataccgggacccgccgccggggcaggggcaggggcccgacgacgactacgtggcgcagacgcaggaggcggacctggagatcctgacgcgggaggacgagccgccgacgcgggtgcagtacacgaaccagccgtcgtgggacgaggccggcgacatccccgaggcgacgcgcaacgtgacgctcccgcgcggccgccggtggaccgactgggtcgactaccggatggactggacgcccgggagcagcacgtggtacgtcgacgggcagccggccgcccgcatcaccttccaggcgccgcgcgacccgctgcaggtcatcttcaacgcctggagcgacggcggcacctggtccgggcgcatgcccgtcggcgccgaggctttcctgcagatcaagtggatcgagattgtctacaacaccacggacaagcaccccggcagcagcggtggcggcggcaaggccaaggaggaggaggatgcggagccggaggcgggatgccgcaaggtgtgcagcatcgacgagacaagcaggatcggcacgccggtgctgttgtcggcgggcaccagcgccgttgcagtctcggcgttgccctggctgtccgcgttgttgacagtctgtgcctgcttcatgctgtgctga

SEQ ID NO: 220 - protein, 410 aa, Myceliophthora thermophilia
MAKDSVRHLAAVLAAAALVAVARGGNSNNNNNNNPLTTDSDCQCYKTNGTAASYFSHHRFFDFGSLHRYVNVTKPIDDFRANAEAPPTSSYFLRPEFADTWDIQRWDNTELMALNDETINDATIKMVNSPNNIYIEHDDDDDDDDDGQATHLTLRTVRHAAGFQSAAEIESLSKGFRYLSVRMRARTRGARGAVTAMFTYRDPPPGQGQGPDDDYVAQTQEADLEILTREDEPPTRVQYTNQPSWDEAGDIPEATRNVTLPRGRRWTDWVDYRMDWTPGSSTWYVDGQPAARITFQAPRDPLQVIFNAWSDGGTWSGRMPVGAEAFLQIKWIEIVYNTTDKHPGSSGGGGKAKEEEDAEPEAGCRKVCSIDETSRIGTPVLLSAGTSAVAVSALPWLSALLTVCACFMLC

SEQ ID NO: 221 - DNA, 2703 bp, Myceliophthora thermophilia
  CDS (1)...(2703)
atgtggttttccaatggtctcaccaatgcctgtgggctcgccttcctaggcgcgctgctgctgtccgtagtagacgcgaagccaatgccaaaggaagggggacgcgacagaatcagcatcaacaccggctggcgcttctaccggagcgagtacaacaccgacaagctggcctacgacctgagccgcaacgactacgcgaaccgcacagatttgaccgtcttgaaaccgtggattctgccctcggctaatgacttcatcgcagacccggccgcacgacaccggcgcccttccggcgagccaaccatcggcatcccctttgtgcggtcgagctacgacgacaccgagtgggagaccgtcgacctgccacacgactgggccatcaagggtccattctacgtcggggacaatgttcccgtcggcggcggcatgggccgcttgcccgtccacggcatcggttggtaccgccgaaaggtggaaatgaccaaggccgacgagggcaggtccatctacctcgacatcgacggagccatgtcgtactcgatcgtctggctcaacggccacctcgtcgggggatggccctacggatactcttcctaccgtctcgacctgacgccttacctcaagctcggcgacgacaatctgttggccatccgcgtcgacaatccagggaactcatcgcgctggtaccccggcggaggcatttaccgcaatgcttggctcaccaagacaagcccgacacacgttgggcagtggggcacctttatcacatcgaggagcgtgtccaaatcgtccgcggtcctcgacctcgccgtccaggtcgagaacgctggagagacctctcagaagctgagcgtggtgacagatgtgtatatcctagactcggcgaccggggaggcccgtacgaaggtggcctcgttcccgcgccagaccatcaccgtcgcggcgggccacaaggtctcggtgaatgcttcgaccactgtcaagaagccagcactgtggggtccaccgccctcgcagtcgccgaatatgcatgttgctgtaacgcgtttatataaccgcaacaacgacatcgttgacacgtacttgaccgactttggcatccgctcggtcgtctatgacgccgatcatggcttgctggttaacggcgagcggatccggatccagggcgtgaacggccaccacgatctcggcgcgctcggggccgccttcaacgtgcgcgcggccgaacgccagctcgaagtgctccaggaactaggctgcaacgctctccgtgtttcccacaacccccctgctcccgaactgctggatctggcagataggatgggcatcctgatctatgacgaggcgttcgacggctggcagctgtccaagaacccgaacgacttccaccttatcttcgacgattggtccgaggccgaccttcgcgccatggtgcgccgcgaccgtaaccacccgtctgtcatcatctggagcattggcaacgaggtcggggagcagaccacgggcgacagcggcgctgccgtggccaggcggctacgccagatcgtccgctccgaggacgagacgcgccccgtaacggcgtccatgaacgcggcccggccgaacatgcccttcccgggggagctcgacctgatcagcctcaactaccaaggcgagggcatccgtgatacgggcccgtacgccggtctgccgggcatcagtacgccgccgctctacctccccttccacgacgccttcccggacaagttgatcgtcagcagcgagacggcggcaaccgtaagcacccgcgggacctacttcttccccatcaccaactggacgagcgcccccgcgaactacacggtcgggagcggcggcaacgacacgctgctccaggtgagcgattacggcctgtatacggccccgtttggctcgtcgcccgacaaggtattcgtggcgcaggacaacgcgtcctttgtgtccggggagtttgtctggtccggctgggactacatcggcgagcccacgccgtactacgcggcgcggagctcgtactttggcatcatcgacctggccgggttcaagaaggaccgcttctaccagtaccaggcccgctggcggccagaccaccccgtcgcccacatcctgccgcactggacctggggggccgaccgcgtcggcgaagtcacgcccgtccacgtcttctccaacggcgaccaggccgagctgtgggtcaacggcaagtcgcagggccgtctgcggcgcgagtccgagtccgtctaccgcttccgctgggacaacgtcacctaccagcccggcgaggtgcgcgttgtcacgtacaggaacggcaagcagtgggccagcgatagggtggtgacggcgggagtgcccgtggcccttcgcctgagagcggaccggtccgcgatcgcgggcgacgggcttgacctgtcattcttgacggccacggtggtggacagcaagggcaatgtggtgccgcaggcggataacgagattaccttcaccgtgtcgggtcgcggcggtggcgagatcgtggcgacggataacggcgacccccgggatttcacatcatttgcgtccaggacgcgcaaggcctttagcgggcttgccttggggattgtgcgtgccaaccggaagggagatatcacggtcacggctagcgcgcccggccttgcccgcgccgtggtcaagttgacggcaaattga

SEQ ID NO: 222 - protein, 900 aa, Myceliophthora thermophilia
MWFSNGLTNACGLAFLGALLLSVVDAKPMPKEGGRDRISINTGWRFYRSEYNTDKLAYDLSRNDYANRTDLTVLKPWILPSANDFIADPAARHRRPSGEPTIGIPFVRSSYDDTEWETVDLPHDWAIKGPFYVGDNVPVGGGMGRLPVHGIGWYRRKVEMTKADEGRSIYLDIDGAMSYSIVWLNGHLVGGWPYGYSSYRLDLTPYLKLGDDNLLAIRVDNPGNSSRWYPGGGIYRNAWLTKTSPTHVGQWGTFITSRSVSKSSAVLDLAVQVENAGETSQKLSVVTDVYILDSATGEARTKVASFPRQTITVAAGHKVSVNASTTVKKPALWGPPPSQSPNMHVAVTRLYNRNNDIVDTYLTDFGIRSVVYDADHGLLVNGERIRIQGVNGHHDLGALGAAFNVRAAERQLEVLQELGCNALRVSHNPPAPELLDLADRMGILIYDEAFDGWQLSKNPNDFHLIFDDWSEADLRAMVRRDRNHPSVIIWSIGNEVGEQTTGDSGAAVARRLRQIVRSEDETRPVTASMNAARPNMPFPGELDLISLNYQGEGIRDTGPYAGLPGISTPPLYLPFHDAFPDKLIVSSETAATVSTRGTYFFPITNWTSAPANYTVGSGGNDTLLQVSDYGLYTAPFGSSPDKVFVAQDNASFVSGEFVWSGWDYIGEPTPYYAARSSYFGIIDLAGFKKDRFYQYQARWRPDHPVAHILPHWTWGADRVGEVTPVHVFSNGDQAELWVNGKSQGRLRRESESVYRFRWDNVTYQPGEVRVVTYRNGKQWASDRVVTAGVPVALRLRADRSAIAGDGLDLSFLTATVVDSKGNVVPQADNEITFTVSGRGGGEIVATDNGDPRDFTSFASRTRKAFSGLALGIVRANRKGDITVTASAPGLARAVVKLTAN

SEQ ID NO: 223 - DNA, 1176 bp, Myceliophthora thermophilia
  CDS (1)...(1176)
atggcagcattgcggctgttctggttactactctgcttcttctcacttagcatggccgtcaagtcgaagccgaagcgggacctgcgatgcctcatgtattttaccggtcagcacccagtggcaccccccgttgagaagctccgacatgtaacgcacgtcgccgtggctttcatgagccctggtctcttcaacgagcccggacggaccgagtggccattgttcaccaccgtcgatgacgtccgggccaagttcccggagaagaccaaggttttggtggccattggtggctggggagacacgatcggcttctccgtcgctgctctgaatgacgaaacgcgaaagacgtttgccgagaatgtggccagcatggtcgcagccacgggtgcggatggggttgacattgactgggaatatccggggggtaacggcgaggattacaagaaggtgcctaattcagccaaggcctgggagattggtgcctaccctctccttttcgcagagctgcgcgccgccctcgggcctcacaagatcgtctcggccgcggtgcccggcctgaagcgggacatgcttgccttcacccgcgagacggtgccccgaatcatgcgccatgtggacttcttgaatgtcatgacgtacgatctcatgaaccgccgcgacgtggtgaccaagcaccacaccggggtggagctgagcctcgaggccgtcgacgcctacgtctctgccggcgctgcgccccagagactcaatttggggtttgccttttataccaggtacttcaagacggaacacgacgcctgcgcgctcgcctcgccgataggctgcccgacgttgctgctcgaagacccggagacgggcgaagatctcggccgcagcggggcgttctcgtggcacgattcggtgccggatgaagtggccgagtcatttgcgcgggcgctggatcacggcgtctacgacgaggaggggggcggatactactattgggatgccatggaggatttctggtggacgtttgacacgcccgacgccatcgagcgcaagtttcctcggatactaggtaagcggcggttgggaggagtctttgcttggggaatcggcgaagacgcacctctgttcaaacactttgcagcactcaatgacgagttggagagatacctggaaggcaaggacgagctgtga

SEQ ID NO: 224 - protein, 391 aa, Myceliophthora thermophilia
MAALRLFWLLLCFFSLSMAVKSKPKRDLRCLMYFTGQHPVAPPVEKLRHVTHVAVAFMSPGLFNEPGRTEWPLFTTVDDVRAKFPEKTKVLVAIGGWGDTIGFSVAALNDETRKTFAENVASMVAATGADGVDIDWEYPGGNGEDYKKVPNSAKAWEIGAYPLLFAELRAALGPHKIVSAAVPGLKRDMLAFTRETVPRIMRHVDFLNVMTYDLMNRRDVVTKHHTGVELSLEAVDAYVSAGAAPQRLNLGFAFYTRYFKTEHDACALASPIGCPTLLLEDPETGEDLGRSGAFSWHDSVPDEVAESFARALDHGVYDEEGGGYYYWDAMEDFWWTFDTPDAIERKFPRILGKRRLGGVFAWGIGEDAPLFKHFAALNDELERYLEGKDEL

SEQ ID NO: 225 - DNA, 747 bp, Myceliophthora thermophilia
  CDS (1)...(747)
atgaagctcatggaggtcttgctgctcacctcctcgatctcgatagcctcggccaagcacatcatgatcccctccacctcgttcaattcgcagtccgatttcgacaccgactggaactacctctacccctggggcagcgaccacaatggtgccgcccgcatgagggagtcgcaggtcagcctctcggacggggtgctcacgctgagggcgacgcgcgtggacggcgaggcgcccgcccaccacggcggcaaggagatcgcaatccgctacctgtcgggcgccgtgcacgccaaggagcgcttcaacgtggtcgccgggggcgggtacgacttcgcgggcgagttccgcgcccccgtggcgcggggcacgtggccggccttttggctgacgggagtcgacagctggccgcccgagatcgacatggccgagtggaagggcagcggcaagatctcgttcaacacctttaacacgtcgtccgaggtccgcgctctggacgtagactacccgaacccggacgccttccacaagatcttgtgcgaggtgagggacatgaacggccaggacgtgagcgtgcgcttctctatggacggccaggtggttgcgacgcagtatgggagggggttcgtggggaagccgttgtacttaatcatcaacttgcaaatggagggctcctcgggatcacccggcccggaatcagacacattattccaggcccgaaacgtggagatctggagttacaattcgtag

SEQ ID NO: 226 - protein, 248 aa, Myceliophthora thermophilia
MKLMEVLLLTSSISIASAKHIMIPSTSFNSQSDFDTDWNYLYPWGSDHNGAARMRESQVSLSDGVLTLRATRVDGEAPAHHGGKEIAIRYLSGAVHAKERFNVVAGGGYDFAGEFRAPVARGTWPAFWLTGVDSWPPEIDMAEWKGSGKISFNTFNTSSEVRALDVDYPNPDAFHKILCEVRDMNGQDVSVRFSMDGQVVATQYGRGFVGKPLYLIINLQMEGSSGSPGPESDTLFQARNVEIWSYNS

SEQ ID NO: 227 - DNA, 1254 bp, Myceliophthora thermophilia
  CDS (1)...(1254)
atgaagcctcgtttgttcctcacaatcttcggagggttcagtcaatcgtggctagcccaaggagttgcccgtcgcatcgatacccagcacgaagcagtcgaagcagcccctgagccctacagcgatgccgcggcgactggcccttcgccatccgagaccaggtacctgcagccgaggctagacttcgatatccgagcagcagcaaggtcggccatcgaggccatgaacaagaagttctattcctccgcgcaggcaatctggtcgccaggtgacccgtggtggctcagcggcgtagctctcaccgctgtcatagactacatgcgcaagacaggtaccggcgattacctgggtcaagttgagaacataatccgggtacagagaacccaacatccgcagaacggtggcgagttccgcgccgactcgactgacgatacgggatggtgggggctcgccatgattcggatgtacgacctgacgggcaacagcacctacctcaacatcgcgaccgaggacgagacctttatgtacaaatactggacttccttcccttgcggtggtggaatatatgtcgacaccaaaaccaagacatacaagaacgccatcgcaaacgagctctacatcaagctcgcggcctccctgcacaaccgcatcgccaacgataccaagtacctttctcgagcggaaaccgcctggacctggttccaaagatcgggcatgatcaagggcgacaacctgatcaacgatggactagccgcttccagcaacggggcctgctacaacaataggctgcccgtctggacctacaaccaaggcgtcattctcggcgccctcgtcgaactctaccgtgccacctcctccgagagctacctgacctcggcccgcgccatcgccgacgcggtcctctccaacgacggcagcaccaatccgcagctcagctccccatacgacggcgaaggcggcgggggcgtcctgacggaggcgtcctgcaagcccgacgagccggacgggtgcaaccatgaccagcaggtcttcaagggcgtcctggcgtacaacctggccgagctcgacgcggccgtcccggacggcagccggccttaccgggcgtacctggagcggaacgcccagagcgcgtacgtcaacgcgcgggagcaggcgacagacctgtacgacgtcggctgggcagggccgcccttcaggaactcgacaatcgggaagcaggcgagcgcggtcgggctgctggtcgctgtggtctga

SEQ ID NO: 228 - protein, 417 aa, Myceliophthora thermophilia
MKPRLFLTIFGGFSQSWLAQGVARRIDTQHEAVEAAPEPYSDAAATGPSPSETRYLQPRLDFDIRAAARSAIEAMNKKFYSSAQAIWSPGDPWWLSGVALTAVIDYMRKTGTGDYLGQVENIIRVQRTQHPQNGGEFRADSTDDTGWWGLAMIRMYDLTGNSTYLNIATEDETFMYKYWTSFPCGGGIYVDTKTKTYKNAIANELYIKLAASLHNRIANDTKYLSRAETAWTWFQRSGMIKGDNLINDGLAASSNGACYNNRLPVWTYNQGVILGALVELYRATSSESYLTSARAIADAVLSNDGSTNPQLSSPYDGEGGGGVLTEASCKPDEPDGCNHDQQVFKGVLAYNLAELDAAVPDGSRPYRAYLERNAQSAYVNAREQATDLYDVGWAGPPFRNSTIGKQASAVGLLVAVV

SEQ ID NO: 229 - DNA, 1032 bp, Myceliophthora thermophilia
  CDS (1)...(1032)
atgtcggtgcaatcgcgtcaggctatgttgtccagacgacctggtctccggccattcatcatcacgaggtcgacttttgccggggcgggtgcatcggttgggaagtggttgggcgataatctgtccacttgggaccactaccgcgccgtcatccggactgtgatggccttcacgtccatctatcaggtgcccatggtcggcgccgacgtctgcggcttcggcggcgacacgaccgaatcgctctgcgctcggtgggcgatgctcggcgctttcagcccgttctaccggtcgcataacgaactcggctctatcccgcaggagttttaccgctggcccacggtggccgaggccgctcgcaaggccatcgatatccgctaccggcttctcgactacatttacaccgccttccagcagcaaaccgtcgacggcactcccgccgtcagccccatgttcttcctgtaccccaacgacgcgaatacctttggcctcgacctccagtacttctacggtcccggtttgctggtcgcgccggtcaccgaggagggcgcaacaagcgtggacgtctacctgccgaaggacatcttctacgactggtacacgcacaaggccatccgtggacagggcaagacgatccgcgtcagcaaccaggggctgaccgacatcccgctcttcctgcgcggtggcgtcatcattcccgcccgggtcaagtcggccatgacgacgactgagctgcgcgagcagaactttgagctgctcatccccgtgggtgcagacggaacagcgacaggccagctgtacctggatgacggcgtcagtctcgagcagaaagggacgacgctcatcaccttcaggtacaggaacggcgtcttgacggcgaggggcacttttgggtaccataccaaggccaagatcaccaaggtgacggtgatcggagctagccgcaagagggacgaagaggcggacacggcggttgtgactgttaaccagccgctgactggcaacttcgaaatcaaaattagcggtgctttgtag

SEQ ID NO: 230 - protein, 343 aa, Myceliophthora thermophilia
MSVQSRQAMLSRRPGLRPFIITRSTFAGAGASVGKWLGDNLSTWDHYRAVIRTVMAFTSIYQVPMVGADVCGFGGDTTESLCARWAMLGAFSPFYRSHNELGSIPQEFYRWPTVAEAARKAIDIRYRLLDYIYTAFQQQTVDGTPAVSPMFFLYPNDANTFGLDLQYFYGPGLLVAPVTEEGATSVDVYLPKDIFYDWYTHKAIRGQGKTIRVSNQGLTDIPLFLRGGVIIPARVKSAMTTTELREQNFELLIPVGADGTATGQLYLDDGVSLEQKGTTLITFRYRNGVLTARGTFGYHTKAKITKVTVIGASRKRDEEADTAVVTVNQPLTGNFEIKISGAL

SEQ ID NO: 231 - DNA, 1851 bp, Myceliophthora thermophilia
  CDS (1)...(1851)
atggcgtcccgacaactgcaaaagatcagactagtacgtattgcacatgtctattacacttatgtcgatctcgatcaagcccgtcagttcctactcgactttggcttcaccgtaaccgaagatcggggggataccgtcttcttcaagggctacagtaccgagccgttcgtctactacgcgatcaagggagcagaaaatgcattcggcggcgcggggtttgttgtcgagtcaatggcagacctagaactcgtatccaagacactacctaaggtaaccgccatcgaggacttggacgctcctggtggcggcaagcgggtgaccttttacgatccggtcgacaacttccccttctaccttgtctacggccagagtgcgatccccgtgaccgcccacctcccagagcttgagtataactatccccagagcaagcaccgcgacgcgctcgacttttacatgacgcgctttaacttcaagccgagcgatctgatctacgacgacaagggcagggacataacgacctttctctatctcgatcagggtatggaacgggttgatcactacacctttttcttctttaagggccaccaatggctgcgagacaggggatataaccttgtctggggcgttggacggcacatccttggctcacaaatctttgactactggtacgactgcttgggatttatccttgagcactacgagcttgctggccacgatagctacacttgggagaacatgctaccattcgttattaagtcatcgacgctcgcgcctcccgactgggagaagcgcggcgcgcccaacgccaccttcgtgttcgaccggactgttttctacgtgcactcttcctcctacggtccactccaggtgtcgtattattccaagagggtgcacccgaccaacacatcgtttgctgaagctctcaggaccatcgacctgcgcccgagccgatctggcttcaacggcgggctcctatccggcagtgcgtacacaaccgagaccattcacccagcatccgctacccgatcgtcctcgcatacaagctatctcacctgcgcaatacagaacattcaactcaaggtttacaacatggctcttgcgtccaaaattctgttcaggggcgacaaagaaaccggtgtcactgtgtccaccgagggaacgtccctctacaccctaacggcgaccaaggaagtcgtcctgttcgccggcatgtttcactcgcctcagctcctcatgctttccggcgtagggcctcggcccctgctcgactcgctgcggatcccagttatctccgacctacccggtgtagggcagcacctccaagaccctatcttcatctcggtccagagcggtgtcaaaacgccatcgttggcaagcgagctggccgacccaaatcggctgggccccaatctcacggcgtacatcaacaagaaagcgggtccttacagctccgcgggtggttacatagcgtttgagaagctgccagccgcgtcccgcgcggttttctcggcccgcaccagggatggctcaccgaccctgcgaacgccgagcagctggaaggtggttcccgaggtcacgcccggccggtccgtcgagacagacgagcagatcctggactatatccagaacaaggctatgcagatgtggcacgcgagtgccaccgacgccatgggtaatgacccggccaatggcaccgtggttgactggcgcgccaaagtcttcggcgtcgacggactgcgagtcgtggacgcctctgctctgccattcgccctgccagggcatcctcaggtaaccatatacgcgttcgccgaagagattgcggcgttgattctagaggatattaaacaatag

SEQ ID NO: 232 - protein, 616 aa, Myceliophthora thermophilia
MASRQLQKIRLVRIAHVYYTYVDLDQARQFLLDFGFTVTEDRGDTVFFKGYSTEPFVYYAIKGAENAFGGAGFVVESMADLELVSKTLPKVTAIEDLDAPGGGKRVTFYDPVDNFPFYLVYGQSAIPVTAHLPELEYNYPQSKHRDALDFYMTRFNFKPSDLIYDDKGRDITTFLYLDQGMERVDHYTFFFFKGHQWLRDRGYNLVWGVGRHILGSQIFDYWYDCLGFILEHYELAGHDSYTWENMLPFVIKSSTLAPPDWEKRGAPNATFVFDRTVFYVHSSSYGPLQVSYYSKRVHPTNTSFAEALRTIDLRPSRSGFNGGLLSGSAYTTETIHPASATRSSSHTSYLTCAIQNIQLKVYNMALASKILFRGDKETGVTVSTEGTSLYTLTATKEVVLFAGMFHSPQLLMLSGVGPRPLLDSLRIPVISDLPGVGQHLQDPIFISVQSGVKTPSLASELADPNRLGPNLTAYINKKAGPYSSAGGYIAFEKLPAASRAVFSARTRDGSPTLRTPSSWKVVPEVTPGRSVETDEQILDYIQNKAMQMWHASATDAMGNDPANGTVVDWRAKVFGVDGLRVVDASALPFALPGHPQVTIYAFAEEIAALILEDIKQ

SEQ ID NO: 233 - DNA, 264 bp, Myceliophthora thermophilia
  CDS (1)...(264)
atgacgacgcgcctggtcagcatgaagcagctcgagcagctcgagggcatgcgcgggctcgacatgcagcgggccgaggacgccatcgtcaagaacacgcgcgagatcgtgccgggcctgatcgtcggcggcatggagctgtccgagatcgacggcgccaaccgcatgggccccacgttcggcgccatggccctgagcggcgtcaaggccgccgaggaggccatccgcgtctttgacctccgcaagaagcagaacgagatctga

SEQ ID NO: 234 - protein, 87 aa, Myceliophthora thermophilia
MTTRLVSMKQLEQLEGMRGLDMQRAEDAIVKNTREIVPGLIVGGMELSEIDGANRMGPTFGAMALSGVKAAEEAIRVFDLRKKQNEI

SEQ ID NO: 235 - DNA, 1606 bp, Myceliophthora thermophilia
  CDS (1)...(1605)
atgcacacggcgagcgtcggcttggcagtaacgccgaccatcatctctaccttcttgtcgcattacttacatcgaaaacccctggcccacaaaccagcagcccatctctcgtatgacgagggcctgcatctgatccgctcctttctggttcatgcctcgcgccacaccgtcgaggagctgcaagccttcaccagccagtgggtaccgcatccccggtgggtaagggtcgaccatgtcacgattcccgagcaggacctcgcgcgcgccgcgcaacttttggtagagcagctgggacccgagggcatccgtcaggtcggcggcagggagtggtggcagtggcgcaagcccaagagcccgctcaaggcagagtggatcgagatgaaggccgattaccagaagcgcaagaagaatgcggatccgggcaaccgtgtcatgctctacatccacggtggcgcctactactttggcagcgtcgacgagcatcgctaccagatccagcgccatgcgcggaagctcaaggcgcgagctctggccccgagataccggctcgctccccagttcccctttccctgtggcctccaggactgcctcgccacgtacctctacctcatctcgcagcagaggccaaacacaatcatccttgccggcgactcggcaggcgctggcatggtcttgagcctgatggtcattctcagagacaggggcatcccgcttccggcgggcgccgtgctcatcagtccctgggtagacttgacgcactcttttccgagcgtcgccggggactgcccgctggactacctcccaccgtcgggcttccatcacaagccgtcgctggcatggccgcctcccgacgaggaagaactggaagcgctcaagaaggcggcatcggtgcagaaaaagagcatcgtcgcgcaagaaggccggcatgctgaagagagcggcatgccaacggtccaggacgttgccaagaccacgcaccgcatgacatttgtcattgacggcgagcaagtcgaaatcaaggagcagattcagatgtacaccaccaacgagctgctagcccacccgttggttagccccgtcatgcaacccaccttgggcggtcttccacctctgctcatcatggtcggaggcggtgaattgctgcgcgatgagcagatataccttgcacacaagtgtgccaaccctgcgcaatacctgccgcccgaagccttgatgaacgaggaggccaaagcgttggtcgaccgatataaacccacggatgttcagctgcaggtgtgggacgacctgtgccatgttgctcctacgctcagctttacgaggcctgccaaatacatgtataggagtgttgcgcagttttcggcgtgggcattggcaagggcccagaacaccgaggttgatattctctgcgacgacgagatctcggtcatttcgagctcgagctcaagctcgagctcttcgagcgggagccaggagaagaaggtttctaagcgggcccctcaaaacagcagcaaagaaaaggccgattatcacgcttcaatcggcaaagcaggcgacccccttccggcctttgaaaaccacatgattcgccaacgggtcacccaccacg

SEQ ID NO: 236 - protein, 535 aa, Myceliophthora thermophilia
MHTASVGLAVTPTIISTFLSHYLHRKPLAHKPAAHLSYDEGLHLIRSFLVHASRHTVEELQAFTSQWVPHPRWVRVDHVTIPEQDLARAAQLLVEQLGPEGIRQVGGREWWQWRKPKSPLKAEWIEMKADYQKRKKNADPGNRVMLYIHGGAYYFGSVDEHRYQIQRHARKLKARALAPRYRLAPQFPFPCGLQDCLATYLYLISQQRPNTIILAGDSAGAGMVLSLMVILRDRGIPLPAGAVLISPWVDLTHSFPSVAGDCPLDYLPPSGFHHKPSLAWPPPDEEELEALKKAASVQKKSIVAQEGRHAEESGMPTVQDVAKTTHRMTFVIDGEQVEIKEQIQMYTTNELLAHPLVSPVMQPTLGGLPPLLIMVGGGELLRDEQIYLAHKCANPAQYLPPEALMNEEAKALVDRYKPTDVQLQVWDDLCHVAPTLSFTRPAKYMYRSVAQFSAWALARAQNTEVDILCDDEISVISSSSSSSSSSSGSQEKKVSKRAPQNSSKEKADYHASIGKAGDPLPAFENHMIRQRVTHH

SEQ ID NO: 237 - DNA, 393 bp, Myceliophthora thermophilia
  CDS (1)...(393)
atggccgcattcctcggccataaggttccgcctcaagcaagacgagacctctggtacccgtttttcgtcaactacaagaatatcgtctatgtttcgagccccagccatctgacaacaatcaccacatgcctgctcaactattactttagcaatgccccgtcggtctggtggcttgtctgcgtggcgttcgttgtcgggcatgcgcaccctctccaaaagggtattaaattgttgagcctcacggcagccgagtgggagagcaagacgatgcccgagacgagggcatggtttcaggactttgtggatatcaaccaaagaaggttgctcctggtcgacctgccgggatggctatgcgttgtcgccacggtggtgacggctctgcgcagcgtctga

SEQ ID NO: 238 - protein, 130 aa, Myceliophthora thermophilia
MAAFLGHKVPPQARRDLWYPFFVNYKNIVYVSSPSHLTTITTCLLNYYFSNAPSVWWLVCVAFVVGHAHPLQKGIKLLSLTAAEWESKTMPETRAWFQDFVDINQRRLLLVDLPGWLCVVATVVTALRSV

SEQ ID NO: 239 - DNA, 1038 bp, Myceliophthora thermophilia
  CDS (1)...(1038)
atgattctcctccacggccgcgggttcagctcgagcacctttggccccgacctcatctccacctctttccccttgcccccgtccccatctctctcccctgaccctattctctcaccggcaccggcaccggcgccggcaaaggaagaggaggaggaagtgaagaaggaaggggaggaaggaggagaagaggaggaagaggaagagcgagccgccctcgggtcgctgcgcaccctgcgcacgctctacccgcacgccaagttcctcctccccacggcgccgcgccaccgggccaccatctacgcgcgcagcctcgtgcgccagtggttcgacggctggcacctatacgcccgtgacgacgacgacggcgacgaggaggaggaggaggaatggcggtgcatcccgggcctgcgagacaccgtcgcgcacgtgcacgagctcgtccgcgccgaggcggcgctggtcggcggcacgcggaacgtcgtcctgggcgggctcagccaggggtgcgcggccggcctcgcggcgctgctgctgtgggacggggaggagccgctggccgggttcctgggcatgtgcgggtggctcgtctttgagcgggccctccgccgggcgatgtcggaaggggagggagacggcggggaggaaggggaagatgacgggtttgatccgtttgagagggaggaggaggaggagaacgaggacgggggcgggatgggcgagaagcaggaagaggtgagcgtggaggctaaggtggtgagggcgctgcgggagacgctggagctggatgatggaaaggggccgacgtgccggccgagggcgttcgatacccccgtgtttctggggcacgggctggacgacgacaaggtcccaatttcccgtggaaggggttctgccaagttcttgaaggccgccgggatgcacgtcgagtggaaagagtaccacggcctcggccactggtactccccggccatgctctccgacatggtgtcgttcctagcacaccaaaccgactgggatcgtgacagaaaaccgtcgtga

SEQ ID NO: 240 - protein, 345 aa, Myceliophthora thermophilia
MILLHGRGFSSSTFGPDLISTSFPLPPSPSLSPDPILSPAPAPAPAKEEEEEVKKEGEEGGEEEEEEERAALGSLRTLRTLYPHAKFLLPTAPRHRATIYARSLVRQWFDGWHLYARDDDDGDEEEEEEWRCIPGLRDTVAHVHELVRAEAALVGGTRNVVLGGLSQGCAAGLAALLLWDGEEPLAGFLGMCGWLVFERALRRAMSEGEGDGGEEGEDDGFDPFEREEEEENEDGGGMGEKQEEVSVEAKVVRALRETLELDDGKGPTCRPRAFDTPVFLGHGLDDDKVPISRGRGSAKFLKAAGMHVEWKEYHGLGHWYSPAMLSDMVSFLAHQTDWDRDRKPS

SEQ ID NO: 241 - DNA, 1188 bp, Myceliophthora thermophilia
  CDS (1)...(1188)
atgggggtgctgcgcaagtatcccgacggcgcagtcattaataaaggcgaggtgattgccatcccagacacgacccagtgcgaagacctccactaccatgcccccagcggaaccatcttcactgcttgcgaggacaatgccgagacgaggttcaagtggttacctccgctcgccaactttgacagtcccgagttggcaagcaagagccggggctcaattcatgtaattgacccaaagaccatgaactctcgcaggctcgagtttgagaactttgatggcccgttcatcacccacggcatcgatgtgattgccgacgaggaacggccagagggcgaggctgtttacatctttgccatcaaccacgttcccgagactcagccgtctggcgaaaaggggccgtatgcccgctcgcagctcgagctcttccaccactttatcggctcctcgtccgtcaagcacctccgctccatctggcatcccctgataacgacgcccaacgacatctttgctcagagcccgtactcgctctatgtgaccaacgaccacctgtaccggcaccatggattaatgcgcacccttgaggatttctaccccggagcgaagtggaccggaatcatccacatccagctcgagtccctgacggcggcggcgcccaccgccggcgttgcggccgaagttgcgctatccggtatacacaacaccaacggtgttggccatgggaggtcggaccgcgagatcttgatctcgagctgcaccagcggcgttctccacttcggacgagtcccggcaggtggatcgggcaacatcaccatcgtcgactcggtcgagatcgaccacgtcgccgacaatcccagctatttctcggacccctatgccacgcccggcgacgaccggagcggtttcctcgagaccgggttgtcgagagccgtcgatattgcaaagaccatgagggacccggcagccaaggaacccgtcatggtcacgtacctgaggcaagcttctcccggtcgctgggagaagcgggtcctcctggacgacgatggtaccacgctcagaagcggcagtgccgcagtcctggtacctatcaaaccgtctgaggcagggagcgccgagggaccacgacaggcttggctctttgcaaccgggtttctgtccaacaacgtcattgctgtcaaggtcgacctctaa

SEQ ID NO: 242 - protein, 395 aa, Myceliophthora thermophilia
MGVLRKYPDGAVINKGEVIAIPDTTQCEDLHYHAPSGTIFTACEDNAETRFKWLPPLANFDSPELASKSRGSIHVIDPKTMNSRRLEFENFDGPFITHGIDVIADEERPEGEAVYIFAINHVPETQPSGEKGPYARSQLELFHHFIGSSSVKHLRSIWHPLITTPNDIFAQSPYSLYVTNDHLYRHHGLMRTLEDFYPGAKWTGIIHIQLESLTAAAPTAGVAAEVALSGIHNTNGVGHGRSDREILISSCTSGVLHFGRVPAGGSGNITIVDSVEIDHVADNPSYFSDPYATPGDDRSGFLETGLSRAVDIAKTMRDPAAKEPVMVTYLRQASPGRWEKRVLLDDDGTTLRSGSAAVLVPIKPSEAGSAEGPRQAWLFATGFLSNNVIAVKVDL

SEQ ID NO: 243 - DNA, 231 bp, Myceliophthora thermophilia
  CDS (1)...(231)
atgcaactcctcgcctccctcgctttcctacctctcctcggcctcacatcaacggccaccccggttccgggcaccaagcgggcggaggacaccaagaccccggcaggctgcaccgacttgtcgtttgggggtaactttgcctggacggccaaggcctttgacttccacgcgtcctacatcttcagcaccccgtcccaccagaactcgtggggctacgtctcgttcgacctg

SEQ ID NO: 244 - protein, 77 aa, Myceliophthora thermophilia
MQLLASLAFLPLLGLTSTATPVPGTKRAEDTKTPAGCTDLSFGGNFAWTAKAFDFHASYIFSTPSHQNSWGYVSFDL

SEQ ID NO: 245 - DNA, 3467 bp, Myceliophthora thermophilia
  CDS (1)...(3465)
atggataagccctcgtctcacaaccagacagggtcattgcaggtcaacggccctctctctcctccccttactccggccgtgaacggcacgggcaacgccacgggcaccctggatggtaccaacaaatccttccccggcgggcgaccagcgtctccggacccaagtatctcctcgaggtccggctctagctcgaaaaatgtatccagcacgacctcgagcccacggccccagccagcgtcgatctttacagcaccctcctcgacctactctcagccgtcctccactccggacctgcgccttctcgaggactctactccccaactgccaaaacgctctctccttgaggccgaacacaaaggacatgccaccccacaagcaccacaagcagcagcagcagcagcagtgacagcagcgacagcatcatcacaacaaaaacaacaacaagcacccggctggcgcaaacggcgcgtctacacggacgggaggcaggacgcgccgttcccgcggctgtccaagccggtggagctgctccgcggcgcgtacgacgtggtggtgatcgggtccgggtacgggggcggggtggcggcgtcgcggatggcgcggacgggccagtcggtctgcgtgctggagcgcggccgcgagaagtggccgggcgagtacccgcgcgggacggccgacgcggtccgcgagctgcactgctccggcgccttcgccccgggctggctcaagggcctcccgatcgacgccggcgaccccaccggcctgttccacctcatcatgggccgcggccagagcgccgtggtgggcaatggactcggagggacgagcttgatcaacgcgaacgtgttcatggaggcggataaggagacattggccatgaaggtgtggccgccggaaatcagggagaatgtggatgagttggataagtactacgcaaaggtggaggccgtcctcgagccccaggagtatccggacgagtggcccaaactggccaaggcggagctgttcaagaagcaggccgagcttctgggactggggcacaagttcaagaaggtgcggcagaccacgcgcttcaccaacgggcccaacagctgcggcgtcgagatgtcgccctcgacattgactggccaggacacgacggggatcaacgacgggtccaagaactcgaccctggtcacgtacatcgccgacgcctggaactggggcgccgagatcttttgcgagtgcgaggtgcgctacatcgagaaggtcgagcacgacgaggggtatcgggtctactttgcctggcacggccgcaatcggggcttgttcaaggccaacttgcatggcgacctcatgtgggtgcatgcgaagaaggccgtcttcctcggcgcgggagccattggctcgaccgagatcttgctacgtagcaacgccatgggcctcgggatgagtgacctggttggccagaacatgagcggcaacggtgacatgctggcgtttggctacaacacggacgaaaagacaaacattctcggatctgagaagccgtctccgtatgatcccatcggccctaccatcaccagcgtcatcgactgccgggaagggaacgagaacccgttgaacgggtttgtcattgaggagggcgccatcccgcacgccctggcccctttcttccaagccatgttggatctcatgccggggaagaaggaatccgagaacgagactctgttcgagaagacgcaggccgccctggcacgctatggcagcaggatcctcgggccgtacttcaagaagggggccgtggagaagacccaggtctacctcgtcatgtcccacgacagcagccaagcggtcctgtcccttgtggacgacaagccaatgctcgaattcaccgggttctgccggagccatcacgtcaagaggctcaaccagctgctcgagaaagctaccgaggctgtcggcggcaccctcgtgcatagccccttccaggcggtgctggaccagcagatcacggtccatcctatcggcggtgcctgcatggcccgggacaacacgggtaagacgggcgtgaccaaccatgcgggccaagtcttcacgggaaggggctctgagacgtacgacggcctgatcgtgacggacgggtcggtcatcccggctgcgctcggggccaacccattcgccaccatcgcggccctggctgagcgctcggtcgagatgtatgcaaagtccaaggggctcaccatcagcgaggagaagaacgggatcctggacctgctcggcgagccccagcacgcgccgcggcgcgaccggccgagccacaaacgggagcagatccggatgatggaggagcaggagagtctcgacatggcggacaaggtgatccggtcagcccgcgagctcagcgcgggcggcatcggcttcaccgaggtcatgtctggcttcatccaccacgacgagaacctgacgggcgacgaccgcgagacgtacgagctcgcgcaccgggtggccaagtcgcggtgcgagagcgcgcgcttcttcctgagcgtgcaggccttcaacacgcgcgagctggtcaggcactcgcagcaccgcggcatgctgacgggcaccttcgtctgcccggccatcccggggtcgcccttcatggtgcagcggggcgagttcaacctcttcatcctcaacaacaaggcgccgggcacccgcaacctgacgtacgacttcgacatgacgggcgtcgacggccggaggctgcacttccacggctacaaggtggtcgactcgtccgtcgccctggccccgttcgagttctggagggccaccagcaccctgtacgtcaccgtcagcaagcacgtcgagggcatgtgcgccgacctcgacgacgaggacgcctggcgccgcggccccgtcgtcgccaagggcgtcatgcacatccggccggccgacttcctctcccagatcgagaccatgacgccgaccgggagcaacgtcgtccggagggccctcagcgccgccagcttcctgacctacttcacccgcaagtcgctgtccctcctgctcacgcccctgacgccgctcgagtacccgaccaagacgtgcagcggctacatcaaccacacgcccccggaccgctccgtcgacatcgtcgccccggacggcgtgtgctcgcgcatgcacgtctgggagcccacccacgtgccggaggactcgggcgtgcgcaacctcttcatgatccccggcgcctcggtcgaccaccagatcttcgccctcccgaccatcccgttcaacgcggtcaactacttcacccgggccggctaccgcgtcttcgtctccgtccaccgcatcagccagctcatgatggccggcagccactggacgacctacgacgcccgcctggacctgcgggcctgcctggagcacatccgcaccgcctacgggcccgagcccgtctacacggtcgcgcactgcatgggcagcgtcgccttcgc

SEQ ID NO: 246 - protein, 1155 aa, Myceliophthora thermophilia
MDKPSSHNQTGSLQVNGPLSPPLTPAVNGTGNATGTLDGTNKSFPGGRPASPDPSISSRSGSSSKNVSSTTSSPRPQPASIFTAPSSTYSQPSSTPDLRLLEDSTPQLPKRSLLEAEHKGHATPQAPQAAAAAAVTAATASSQQKQQQAPGWRKRRVYTDGRQDAPFPRLSKPVELLRGAYDVVVIGSGYGGGVAASRMARTGQSVCVLERGREKWPGEYPRGTADAVRELHCSGAFAPGWLKGLPIDAGDPTGLFHLIMGRGQSAVVGNGLGGTSLINANVFMEADKETLAMKVWPPEIRENVDELDKYYAKVEAVLEPQEYPDEWPKLAKAELFKKQAELLGLGHKFKKVRQTTRFTNGPNSCGVEMSPSTLTGQDTTGINDGSKNSTLVTYIADAWNWGAEIFCECEVRYIEKVEHDEGYRVYFAWHGRNRGLFKANLHGDLMWVHAKKAVFLGAGAIGSTEILLRSNAMGLGMSDLVGQNMSGNGDMLAFGYNTDEKTNILGSEKPSPYDPIGPTITSVIDCREGNENPLNGFVIEEGAIPHALAPFFQAMLDLMPGKKESENETLFEKTQAALARYGSRILGPYFKKGAVEKTQVYLVMSHDSSQAVLSLVDDKPMLEFTGFCRSHHVKRLNQLLEKATEAVGGTLVHSPFQAVLDQQITVHPIGGACMARDNTGKTGVTNHAGQVFTGRGSETYDGLIVTDGSVIPAALGANPFATIAALAERSVEMYAKSKGLTISEEKNGILDLLGEPQHAPRRDRPSHKREQIRMMEEQESLDMADKVIRSARELSAGGIGFTEVMSGFIHHDENLTGDDRETYELAHRVAKSRCESARFFLSVQAFNTRELVRHSQHRGMLTGTFVCPAIPGSPFMVQRGEFNLFILNNKAPGTRNLTYDFDMTGVDGRRLHFHGYKVVDSSVALAPFEFWRATSTLYVTVSKHVEGMCADLDDEDAWRRGPVVAKGVMHIRPADFLSQIETMTPTGSNVVRRALSAASFLTYFTRKSLSLLLTPLTPLEYPTKTCSGYINHTPPDRSVDIVAPDGVCSRMHVWEPTHVPEDSGVRNLFMIPGASVDHQIFALPTIPFNAVNYFTRAGYRVFVSVHRISQLMMAGSHWTTYDARLDLRACLEHIRTAYGPEPVYTVAHCMGSVAF

SEQ ID NO: 247 - DNA, 1272 bp, Myceliophthora thermophilia
  CDS (1)...(1272)
atgctcggaaggcagagaatcgccgtctcagtcgtcctcgcctccgccgccggcgcatttgctccgtttctgctcttcccgaaaatgcttcgattggattcacaaccggactcacgaccggacaagcccgtggcatccgagtctccggggtcctcaaaaaaattggatcatgtctcccatcaggtgtttatctcgccttcgcccgcacttgaaggacatgaaacaggttccgacctggacttctacgaaacgctcgaccaagactacagcgaagccatagcgcacctcccagtggaggaagccatcctcacgacagcaccccacgtcccgccccccatcactcgggactaccccgtcctcctccgggtgtccctcacggcgtacaccaagctgatccagcttaccaaccggtaccaatacgagcagtggacgttcaacggcaccgtcccggcgccattcatccgcgcccgggtcggcgacgttgtcgacctgactctcaccaaccgcgacgcgaccggcaacccgcacaatatcgactgccacgccttcacggggcccgggggcggctccgcgctcaccaccgccgaggagggggagactaaggcggcccgcttccggcttctccgcccgggcatctatctctaccattgcgccgccgcgcccgtgcccgtgcacatcgccaacggcatgtacgggctcatgtacgtgcagccggcggtcccggggggcggagaggggctcccgcacgccgaccgcgagtactacgtcatgcagagcgagttctaccacgagccgcccgaggtgggcgacgacgggaggccctcccggacggtcgagttctcgtacccgaacgggctggccgaggagcccgcggtcgtcgtgttcaacgggcgcgagtcggcggcgacgcgggacgcggcgctgcgcgcccggaccggcgagaacgtccgcctcttcttcggcaacgccggccccaacctgaccagctcgctccacgtcatcggcagctgctaccggcgcgcctaccgcgacggcgacgtgctcggcccgcccgcccgcttcgtctccaccgtcagcgtgccccccggcggggcgaccatcctcgacatgaagatggtggtccccggcacctatacgctcgtggaccacgccatcttccgcctcgacaagggcgccgtcggcttcctaaacgtgtctgggaagccgaggccggacatctacgggagccaagagccgcctgcgccgtgtgttgggtgcaagctacacagctag

SEQ ID NO: 248 - protein, 423 aa, Myceliophthora thermophilia
MLGRQRIAVSVVLASAAGAFAPFLLFPKMLRLDSQPDSRPDKPVASESPGSSKKLDHVSHQVFISPSPALEGHETGSDLDFYETLDQDYSEAIAHLPVEEAILTTAPHVPPPITRDYPVLLRVSLTAYTKLIQLTNRYQYEQWTFNGTVPAPFIRARVGDVVDLTLTNRDATGNPHNIDCHAFTGPGGGSALTTAEEGETKAARFRLLRPGIYLYHCAAAPVPVHIANGMYGLMYVQPAVPGGGEGLPHADREYYVMQSEFYHEPPEVGDDGRPSRTVEFSYPNGLAEEPAVVVFNGRESAATRDAALRARTGENVRLFFGNAGPNLTSSLHVIGSCYRRAYRDGDVLGPPARFVSTVSVPPGGATILDMKMVVPGTYTLVDHAIFRLDKGAVGFLNVSGKPRPDIYGSQEPPAPCVGCKLHS

SEQ ID NO: 249 - DNA, 366 bp, Myceliophthora thermophilia
  CDS (1)...(366)
atggcacacgacggccgttacacggcgtcatctgccctcaacctgcagccctataagagcaacgcgttttctcggcgccttggggccattttcttggcagagcgtgctcagcacgcgtgcaagcacacgcaattctccttcgccgccttctgcgacccggcctcgctgatccagaacccgtgcggcgagcgccacatctgggccaccatcgtgctcggcgacccgtgcgacgattgcagagccgccgtgacggcagcggcggcgggggcgactggcggaggagaaggaggagatagtgggaatcgggggggtgcgtatgagcgcggatacccgtttgcgcacggctacggccaagggaggcaatga

SEQ ID NO: 250 - protein, 121 aa, Myceliophthora thermophilia
MAHDGRYTASSALNLQPYKSNAFSRRLGAIFLAERAQHACKHTQFSFAAFCDPASLIQNPCGERHIWATIVLGDPCDDCRAAVTAAAAGATGGGEGGDSGNRGGAYERGYPFAHGYGQGRQ

SEQ ID NO: 251 - DNA, 411 bp, Myceliophthora thermophilia
  CDS (1)...(411)
atggcagcaggttcagatccgtcttcttactcgggggggtccctggaggccgatcacctctgcgtgttggtgcatgggttatggggcaatccgaaccacatggcgtcggtcgccaaagccctccgggcgcagcacccggccgaccgggtctacatcctgctggccaagagcaacagcggctccttcacgtacgacggcatcgagctaggcggtgagcgcgtgtgccacgagatcgaggaggagctggacatgatccgggccaggggcggcagcatcaagaagctcagcatcgtcggctactcgctgggcggtctggtcgcccggtacgccatcggcctgctctttgcccggggcgtcctcgacaagctcgagtgcctcaatttcaccgccttcgcgagccccttcctcggg

SEQ ID NO: 252 - protein, 137 aa, Myceliophthora thermophilia
MAAGSDPSSYSGGSLEADHLCVLVHGLWGNPNHMASVAKALRAQHPADRVYILLAKSNSGSFTYDGIELGGERVCHEIEEELDMIRARGGSIKKLSIVGYSLGGLVARYAIGLLFARGVLDKLECLNFTAFASPFLG

SEQ ID NO: 253 - DNA, 635 bp, Myceliophthora thermophilia
  CDS (1)...(633)
atggccccttcggcaatctctcccgctcagcagcatgctcagctcgccttcgcccccaagaaggtcaaagatgccgctgccgaggttgaggaccgcgccgccggcctgaccaagcctctggccgagatgatgggcaactgggacgactttagctttgccccgatccgcgagagcaccgtctcgcgcgccatgacccgccggtactttgccgacctggacaagtacgccgagtccgacatcgtcatcatcggcgcgggctcctgcggcctgtctgcggcgtacacgctcggcaagctgcggccggacctgcgcatcacggtgatcgaggcgggcgtcagccccggaggcggcgcctggctgggcgggcagctgttcagcgccatggtgatgcgcaagccggccgacgtcttcctgcgcgaggtgggcgtgccctacgaggacgagggcgactacgtggtcgtcaagcacgccgccctcttcaccagcaccgtgctgtccaaggtgctggccatggacaacgtcaagctgttcaacgccaccaccgtcgaggacctcatcacccgccccgacccggacagcgaggacatcggccccggcgtccgcatcgccggcgtcgtcaccaactggaccctcgt

SEQ ID NO: 254 - protein, 211 aa, Myceliophthora thermophilia
MAPSAISPAQQHAQLAFAPKKVKDAAAEVEDRAAGLTKPLAEMMGNWDDFSFAPIRESTVSRAMTRRYFADLDKYAESDIVIIGAGSCGLSAAYTLGKLRPDLRITVIEAGVSPGGGAWLGGQLFSAMVMRKPADVFLREVGVPYEDEGDYVVVKHAALFTSTVLSKVLAMDNVKLFNATTVEDLITRPDPDSEDIGPGVRIAGVVTNWTL

SEQ ID NO: 255 - DNA, 1278 bp, Myceliophthora thermophilia
  CDS (1)...(1278)
atgagcgacccagcccctaagcgccccttttcaaaggtcatcatagtgggcgcgggcccggcggggctgctgctggccctgctgctctccaagaagggcatccccgtgcacattctcgaggcggcggcggagctggaccagcagccgcgggcggcgcactacggcgcgcccgcgatccccgagttcctgcgcgcgggcatcgccgagcgcatccgcgagcgcggcatggtcctcgacaccatgtgctggcgcgcccccgccgacagggaccacgcttacatcgccggcttcgacgctcgccgggtgctgagcgacgtcgacggccgcggcaccgacctgcggacgcactgcctcgcgctgcaggagctggacgcgctgatgctcgaggaggtgacgggccggtacggcggcctgatcgagtgggagcacagggttgtcagcgtcggccaggacgccgacggggcctggtgcgaggtcgaggtcgccggcggcaggggcgggaagaaggtggtcaggggcgattatgtggtcggttgcgacggcgcgaatagcacggtgcgcaagtcgctgtttggagacgagttccctgggttcacgtgggatgcgcagattattgctaccaacacgtactacccctttgcggagaagttcggctggcaggatgccaatttcatcatccacccggaacacttctttatggcggctaggataacccgcgatggcctctatcgcatcacgtatggcgagacaccgggtctctcccgcgaagaataccgagaacgcctgccctggaaattcgagaccatcctccccggccaccctaagcccgacgaatacaaagtcatcaacttctccccctacaagatgcaccagcggtgcgcccccaagttccgtgttggcagggtgctcttggcagccgacgcggcccacctatgcaatccctggggtggacttggcataaccggcggctttgtggacgtcggcgggctgtacgattgccttgcgggaatctgggacggcaaggcggacgagtcaatcctggatctgtactcggagaagcggatagagaagtggaagaccatcatcaacccggtctcgtccgagaacttcaggagggtgtcggacaaggaccccgccacgaggttcgagagggacgagtttatgcagatgttgaagaagggcgagacggacgaggcttttctgaaagaattgctgatgggcccgatggaggtgcggtacgacttcacccagaattataaggatgcggcgaagatatga

SEQ ID NO: 256 - protein, 425 aa, Myceliophthora thermophilia
MSDPAPKRPFSKVIIVGAGPAGLLLALLLSKKGIPVHILEAAAELDQQPRAAHYGAPAIPEFLRAGIAERIRERGMVLDTMCWRAPADRDHAYIAGFDARRVLSDVDGRGTDLRTHCLALQELDALMLEEVTGRYGGLIEWEHRVVSVGQDADGAWCEVEVAGGRGGKKVVRGDYVVGCDGANSTVRKSLFGDEFPGFTWDAQIIATNTYYPFAEKFGWQDANFIIHPEHFFMAARITRDGLYRITYGETPGLSREEYRERLPWKFETILPGHPKPDEYKVINFSPYKMHQRCAPKFRVGRVLLAADAAHLCNPWGGLGITGGFVDVGGLYDCLAGIWDGKADESILDLYSEKRIEKWKTIINPVSSENFRRVSDKDPATRFERDEFMQMLKKGETDEAFLKELLMGPMEVRYDFTQNYKDAAKI

SEQ ID NO: 257 - DNA, 1014 bp, Myceliophthora thermophilia
  CDS (1)...(1014)
atgtactactccaccttcacgacctcggacaactgccccctggcattccaatcgtccctgcccctcccgatcgccgccgccgaaggcgccagcgctcccaagacgtgcatcctcctgctgcacggcttctcgggctcctcggcctacttcacccgcaacgcggccgccctctcgtcctcgccggcggcccactgggtcgtctgcccggacatgcgcggacacggccggtccggccacaacccggcgcgcggcggctaccacgtggcgcgcctggccgccgacctgcgcgagctgctcgcccatctgcgacgacagctccccaccgccgaggccgaggccgccgccccgcccgcggtccggttcgtccccgtcgggtgctcgatcggcgcggccgtcgtgtggacgtacctggagctgtttggcgagcgggacggcggcggggaggacttatttgccgggttcgtcttcgtggaccaggcgccgctgcaggaccgggcggcgctgggactgggcggggcgtggggcgcggaggcggcgcaccgcgggtgcttcgacgaggccagcatgctggccgcgcagagggcgtgggtggaggagccggcgcggacgcaccgggcgctggtgcgggagtgcctcgggtatcggttcgcgcccacgcaggaggaggcggacgacgacgagggcgaggagcgggcgcgcagggacgaggacttcttcacgggcatcagcgccgtctgcgacggggtctggctggccaggctgctggccgatcacacgcggtacgaccaccgcgaggcatgcgaggccgtcaccaagccggtgctggtcatggccggccggcgcagcgggtgtttcccgctcgaggggatggaggagacggtgaggagggccagaaaggggggcaaccgggacgccgagatgatggtgtttgagtcggggcactggctgttctacgaggagcccgagagattcaaccgggagctgctcaagtttgtggagcggtgcacgagctga

SEQ ID NO: 258 - protein, 337 aa, Myceliophthora thermophilia
MYYSTFTTSDNCPLAFQSSLPLPIAAAEGASAPKTCILLLHGFSGSSAYFTRNAAALSSSPAAHWVVCPDMRGHGRSGHNPARGGYHVARLAADLRELLAHLRRQLPTAEAEAAAPPAVRFVPVGCSIGAAVVWTYLELFGERDGGGEDLFAGFVFVDQAPLQDRAALGLGGAWGAEAAHRGCFDEASMLAAQRAWVEEPARTHRALVRECLGYRFAPTQEEADDDEGEERARRDEDFFTGISAVCDGVWLARLLADHTRYDHREACEAVTKPVLVMAGRRSGCFPLEGMEETVRRARKGGNRDAEMMVFESGHWLFYEEPERFNRELLKFVERCTS

SEQ ID NO: 259 - DNA, 4197 bp, Myceliophthora thermophilia
  CDS (1)...(4197)
atgagtctgcggcatcatccctttgaccccctgacgtcgagcgagatccggcaggccgctgatattctgcgacgctatgtccctggcacggacattcatttccgggtcatcaccctctgggagcctcccaagtccgagatggtccctttcctggaaatggagcatgggggctccgagacagcaaaaactccagcgcgaatggccagggtgcaggcatatgtcgacagcactttcaccgagtacaaggtcaacctcgaccagcaagccgtggtcgccgaggagactctccacggccggcatgcgcacattgacggagagtacatgcgcaaggtcgaactggcatgcatggccgacccccgcgtcaaggagcaagtggccgcccttaacctcccagaagggtccacagtggtagtcgagccgtggacgtacggccccgacggcatgaacgacatgtccaagcggatgaccatgtgctggttctacatgcgcctctccgacgacaaggacgccaactactacgcgtacccgctcgagttatgcgtcgaggtgtccgacgatctcaaagtggtcaagatcttgcacctcccgtcaggggagcatgatcgtgtgcggaccgaaggcaacccgaaggagtttgaccgccgcaagatccacgaaggaagcgagtactacccgaccctcaataccaagcagcgcaccaccacgaagccctaccacgtctcccagcccgagggcccgtccttctccatcgaggggaacaagatcacctgggagaagtggacgatgcgggtgggattcaactaccgcgagggcatgactctgcacgacgtccgcttcgacgaccgcagcctgtactaccggctgtccctggccgagatgtttgtgccctacggcgacccccgcacgccgtacccgcgcaaggccgccttcgacctgggcaacgacggggcgggcgtctgcgccaacaacctccagctgggctgcgactgcctgggccacatcaagtactttgacggctggctcgtctcgcgcgacggcactccgctcaagatgccccacgtcatctgctgccacgagatcgacgacggcatcctctggaagcacaccaacccgcgtaccggcaacgccgccgtggcgcggtcccgcgtgctggtcctccagaccatcatcacggccagcaactacgagtacgtcttctgcttctacttcggtcaggacgcgtccctgcactacgaggtgcgcgccaccggcatcctctccacggcgcccgccgacttctcgtccccggccccgctcccctacggcacgacggtggcccccggcgtgctggcccccttccaccagcacctcttctgcctgcgcatcgacccggccgtggacggctaccgggccaactcgctgttggtcgaggagtcgcacccgctgccgccctcggcggccgacaacccgcacggggtcggctacgtcacccggcagacgtacgtcgagcacgagacgggcctggacctcgaccacaccaccaaccgcgtcttcaagatcgtcaacgagcgcaggcaccacccggtcgcgcgcacccccgtcggcgtccgcctgctgccctgctacagccagctgctgctcgcgcatccggacagcctgcacgcgcgccggtccgagttcggcgcccacgcggtctgggtcacgcgccacgccgacgacgaggccttccccgccggccgcttcaccatgcagtcggcgggcggcgaggggatcgcctcgtggatccgcaagcgcagggagcgaaggagaggagaagaggtcggagggagcagcagcaaccgagagggaaggggaaacgagaagaaaggcggaaaggaagggaacgtggtggaggaagaggatgatacgtgcgtcaggaacgcagacattgtcgtgtggcatacctttgggtccacgcacaacccccgcgtcgaggactggccgatcatgccggccgagaagatggttgtcgggctgaagccggtcaacttctttgagcggaacccggctctggacgtaccgccgtcgacacaggagaggaacctgagcgtgttggttgaaactgggggcggggttggagaggaacggaaggaagagaaagaggcggagtgctgtgtcgagagattcagggggcgttcgaccggtgccgggcagagacccaaggaagcccgccagcgggtgctgatctcgacccaatatgagcgcaagatagaccatttcgagtcccgcctcaccaacatcgagaacatgctccgcgagttgaccgtttccatccacagcaggagcccttcgatgtcggtgtcggccgccgacagcgcacccgccggccccgtctcgaacgcgtcaccagccgcggacagcaccgacattgtgtacggcatcgacaacgacgacgacgccgtctcggctttcgaaggggactcctccatgaccgcccagaccgccttcgtgagcgagtttctcgagaacacggtgacccggacgctccccccggatctcgagcccgacatgcagtccgccctgtcctcgctccagcagatcgtcagcatgcagaaccggcctagcccccacgagtcccgcttcgtgaacgcgaagccgctgccgaaaggcgggctacgcgaccttcccatgccgccggcccacgtcgtcgttgccgccctgcgcgaggccaaagacgccggcctcgcaagcttcgcgactatctgcacctttgtcgcggccgagaactttgccgagcggtgtagcaaggtctacttcgccaccgaggacttcagcctcatgtcgtggggcgtcgtcaatgccgggctgtacttcttgctgcaggagaaggcctcgctggccgaagggccgcaacggacgcagcttctcgagtaccagtccctctgccgcgacaacctcgagaccgccctgaccaacttgccgctgctgatgccggcgcgcaaggagagcatcgaacttttgttgttgggcgccatctacgccatcgagatctccaagttctcgctcgcgcgggacctcaacaccaaggcggccacgctgtgtcagaatctcgggtaccatcggatgagcggcggcggcgccgacacggccgccaaggccgtcctcttctggtcggcctacctgctcgacaaggcgctgtccatccgctccggccgcgcccccgtcatccaggactacgacatcacggtgcgccggggcctgggcgacggcatcgacctgcccgacacgtcctggcgcgtcgtcctgaaccagtggatctcgtacgccgacttcctcgggagggcgtatgagcagctctacagccccgccgcgctggcccggccgcaggagagtagggccgagagcgccaggcagctcgtccagacgatgcttgacctagccaaggagcaagagccgctgatgcgacacacgcgggagaagatgcgcggcgtcaagttcgacgccaacagcccgttccccatggacatggccatcctgggcgacgagctgatgcactggtcggccctgacgctcgtctaccgcgccatccccagcccgcccgggtcgcccagcaccttcaaccaggagtgcatccacgcggcgcgccaggcctttgcgtgccaccaggagtacatggagatggcgggcgacagcctagctgtcagagcagggtgtatccgatggaacatcatctacgtccccttcacgcccgtcatcatcctcttctgccacatcgtcgagacgtcggacgaggcggacctgcggcgcctcgccgactttgtcgaatcgctgcagcccgtgtgcgacgcgtccgaggccgtcgccaagttccaccgcatctgccaggtgctgcacaacgtggccagcctctgcatccgcgccaaggcccagcgccagcaggagccccacatgcgcgaccaggacatggccatggtcggcgacaacatcgacatgtacctgagccagctcggcttcatgccccagtttggcggtgctggtggtgccgccgggaacacccccccggccggggcggcctctggacagtttggcggcggcatggcggccgcgggtctcggtgtcgccgcccaggcgagcgagctgggcaactggttttcggggaatacccacatcctgggactgctggaggaggatctgtccgagttcgagccgcgtatgtggacggctatgggagggcagtaa

SEQ ID NO: 260 - protein, 1398 aa, Myceliophthora thermophilia
MSLRHHPFDPLTSSEIRQAADILRRYVPGTDIHFRVITLWEPPKSEMVPFLEMEHGGSETAKTPARMARVQAYVDSTFTEYKVNLDQQAVVAEETLHGRHAHIDGEYMRKVELACMADPRVKEQVAALNLPEGSTVVVEPWTYGPDGMNDMSKRMTMCWFYMRLSDDKDANYYAYPLELCVEVSDDLKVVKILHLPSGEHDRVRTEGNPKEFDRRKIHEGSEYYPTLNTKQRTTTKPYHVSQPEGPSFSIEGNKITWEKWTMRVGFNYREGMTLHDVRFDDRSLYYRLSLAEMFVPYGDPRTPYPRKAAFDLGNDGAGVCANNLQLGCDCLGHIKYFDGWLVSRDGTPLKMPHVICCHEIDDGILWKHTNPRTGNAAVARSRVLVLQTIITASNYEYVFCFYFGQDASLHYEVRATGILSTAPADFSSPAPLPYGTTVAPGVLAPFHQHLFCLRIDPAVDGYRANSLLVEESHPLPPSAADNPHGVGYVTRQTYVEHETGLDLDHTTNRVFKIVNERRHHPVARTPVGVRLLPCYSQLLLAHPDSLHARRSEFGAHAVWVTRHADDEAFPAGRFTMQSAGGEGIASWIRKRRERRRGEEVGGSSSNREGRGNEKKGGKEGNVVEEEDDTCVRNADIVVWHTFGSTHNPRVEDWPIMPAEKMVVGLKPVNFFERNPALDVPPSTQERNLSVLVETGGGVGEERKEEKEAECCVERFRGRSTGAGQRPKEARQRVLISTQYERKIDHFESRLTNIENMLRELTVSIHSRSPSMSVSAADSAPAGPVSNASPAADSTDIVYGIDNDDDAVSAFEGDSSMTAQTAFVSEFLENTVTRTLPPDLEPDMQSALSSLQQIVSMQNRPSPHESRFVNAKPLPKGGLRDLPMPPAHVVVAALREAKDAGLASFATICTFVAAENFAERCSKVYFATEDFSLMSWGVVNAGLYFLLQEKASLAEGPQRTQLLEYQSLCRDNLETALTNLPLLMPARKESIELLLLGAIYAIEISKFSLARDLNTKAATLCQNLGYHRMSGGGADTAAKAVLFWSAYLLDKALSIRSGRAPVIQDYDITVRRGLGDGIDLPDTSWRVVLNQWISYADFLGRAYEQLYSPAALARPQESRAESARQLVQTMLDLAKEQEPLMRHTREKMRGVKFDANSPFPMDMAILGDELMHWSALTLVYRAIPSPPGSPSTFNQECIHAARQAFACHQEYMEMAGDSLAVRAGCIRWNIIYVPFTPVIILFCHIVETSDEADLRRLADFVESLQPVCDASEAVAKFHRICQVLHNVASLCIRAKAQRQQEPHMRDQDMAMVGDNIDMYLSQLGFMPQFGGAGGAAGNTPPAGAASGQFGGGMAAAGLGVAAQASELGNWFSGNTHILGLLEEDLSEFEPRMWTAMGGQ

SEQ ID NO: 261 - DNA, 1938 bp, Myceliophthora thermophilia
  CDS (1)...(1938)
atgccgcaggtgaaagcagagacgatggggctatccagtagcgaggcggccgacgctagtcatgcaatggcgggtgatgcgattgtcgatgatgcgccggcacagtcacctgcaactgcgcctgtacctgcacctacacctgcgctgcaggtcattgtcttgggctccggtggagggcctttagaaaacaatgtgacggccttccttgtgcgctccgttgcgtcagggtgggccaggggctcagttgttgccgttgacgccggagtacacctcagcgccatcaagacaatactagagcaaacgcaaccggcaaaactaggacagccaggtggccctgcattgccgcatacgctcaccacgggtccttttgcgggcctcgaagtccatcatgccacggccgatgcaaacgccgccgaaatccacaagactctaatagaaacatacctgataacacaccctcacctggaccatatcgcagggttcgtcatcaacacggccggcttatcaggctcccgaccaaagaaggtcgccggactcccaagcaccatcactgccttgaagacacacgtcttcaacaatgtcatatggccgaacctgagcgacgagaacaacggtgctggacttgtcacctacatgcgactcgtcgaaggcgggtctccagcgcttggagaaggagaaggaaggggctacctcgaagtctgcagcgggcttgctgtcaaggcatggagcgtcagtcatggccactgcatcgagagacacagtcatcgcggtagcagcagcacccgtcatggcagtttcgacgcctcgtcgatgggccctggtcctccgcaagtcgtgccgactccttcccgcaacatcccgcaacatacgtctttgcccaccaacatcggcgcctacttgcaacagcacgagcgcatacagtcttcgccggccagcaggcgcggcagctcgttctcggttgcaccgcccatcgatgacacagtctgcgtctacgacagctccgtctactttgtccgggacctcgccacgggccgcgagatcctcatatttggcgacgttgagccagacagcatcagtctctcgccacgcaaccggcaagtttggcaggaggtggcgcccaggatcgtctcgggcgacctggccgccatttttatcgagtgtagctacgacgattcgcggtgcgatgagcgcctcttcggccacctcacccctcggttcgtttgcgaagagatgatagcgctggcggaggaggtcattgcactgcggctagaaaaagagagagtcatgtctggtggccgagtcggcgccgaaaggaaacgcaaacgcctcagcgatgagggctccctgccgaagcgcaaaaacactcctcagccaagagggccaatctcggccgccgatatcccactttcccctcggagcatcgaccctagctggcacatcaagcccgctgtcaaccccgtctccgcctatacgtcggacttccgagaccgcagccaagaccgcatcccgaaaactatcccgcttccgacacatcccctacggagcacaaccactgtcgaacccaacgccgctgaggcgaaaggacaagaccaagatgcgacatcgcgggcagtgcccgagccgagccccacgccgatgtcggcagcaacatcagcaacggcggcatcgacggccgtcacgccgctggccgtcgccacgtctcagctacacctgctacagcaggaaaacgacgagagtcactcctcctcctccactagtccttccctgcggaatgcgctcagggggctccaggtggtggtgatacacgtcaaggaaacgatgcttgacgggccgagcgccgggaacgtgatattggaggagctgagggcgcacgagcgggaggcgggcctgggaatcgagttctcgatcagtgaggcgggaagtcagtatttcttttag

SEQ ID NO: 262 - protein, 645 aa, Myceliophthora thermophilia
MPQVKAETMGLSSSEAADASHAMAGDAIVDDAPAQSPATAPVPAPTPALQVIVLGSGGGPLENNVTAFLVRSVASGWARGSVVAVDAGVHLSAIKTILEQTQPAKLGQPGGPALPHTLTTGPFAGLEVHHATADANAAEIHKTLIETYLITHPHLDHIAGFVINTAGLSGSRPKKVAGLPSTITALKTHVFNNVIWPNLSDENNGAGLVTYMRLVEGGSPALGEGEGRGYLEVCSGLAVKAWSVSHGHCIERHSHRGSSSTRHGSFDASSMGPGPPQVVPTPSRNIPQHTSLPTNIGAYLQQHERIQSSPASRRGSSFSVAPPIDDTVCVYDSSVYFVRDLATGREILIFGDVEPDSISLSPRNRQVWQEVAPRIVSGDLAAIFIECSYDDSRCDERLFGHLTPRFVCEEMIALAEEVIALRLEKERVMSGGRVGAERKRKRLSDEGSLPKRKNTPQPRGPISAADIPLSPRSIDPSWHIKPAVNPVSAYTSDFRDRSQDRIPKTIPLPTHPLRSTTTVEPNAAEAKGQDQDATSRAVPEPSPTPMSAATSATAASTAVTPLAVATSQLHLLQQENDESHSSSSTSPSLRNALRGLQVVVIHVKETMLDGPSAGNVILEELRAHEREAGLGIEFSISEAGSQYFF

SEQ ID NO: 263 - DNA, 816 bp, Myceliophthora thermophilia
  CDS (1)...(816)
atggcgaactcataccctcagatcgttctctttggagactcgctcttccagggtaccgccgatgtgtccggcggcttttctttccaggctgctcttcagacacaggtcctacgccggttcgacgttatcaaccgcggcttctcaggatacaacacatccaatgccctaagcatacttccgcaggtcttttcaccgccgacacccggtggaccagaactcaagtacttgttcatcctcttcggcgccaacgatgcagccgtcccgcttcccaccaactttcagcatgtgcccctggacaagtacaaggagaaccttgcccgcatcatcaaccatcccatcatcacggcgcacaagcccaaaatcttcctcgtcacaccaccacccttagatgagattcgcgtgaccgtactcgaccgggccaacggacatccctccgcggcaaggcggaccaaggttagcgcggcttactccgaagccgtccggcaggtcgctgcggagcaccccggtgtgacgctgatagatcttcacaaggcgctcatggacagggccattgagatgacgccgggcttcgaccccaagggcccggcgctgggcgatccggagggcggcgttcgcgggtacctcgagcatctgcttccggatgggctccacctaagcaccgagtcataccgcatcttctacgatctggtgcggccccatatcggctctgaatgggctggaaccaaggacgaggacagagttgggtatgtactgccggactggcgtaacgcgccgtggctcgaagaagaccagcacctccgaggcaagtctctataa

SEQ ID NO: 264 - protein, 271 aa, Myceliophthora thermophilia
MANSYPQIVLFGDSLFQGTADVSGGFSFQAALQTQVLRRFDVINRGFSGYNTSNALSILPQVFSPPTPGGPELKYLFILFGANDAAVPLPTNFQHVPLDKYKENLARIINHPIITAHKPKIFLVTPPPLDEIRVTVLDRANGHPSAARRTKVSAAYSEAVRQVAAEHPGVTLIDLHKALMDRAIEMTPGFDPKGPALGDPEGGVRGYLEHLLPDGLHLSTESYRIFYDLVRPHIGSEWAGTKDEDRVGYVLPDWRNAPWLEEDQHLRGKSL

SEQ ID NO: 265 - DNA, 1164 bp, Myceliophthora thermophilia
  CDS (1)...(1164)
atgccttccgacgataagaccctcctccctctgcaggaggcgctgaacttggtcaaattggccgcagaaggcgactcccggcggtacatggggacgagggcagcgtacctgcccggggccgatctttcgccggacaagggcatgctgagcacgcataaggctgcttttggtggccatgtgtatggtcaagccgcattggccgttgcacgaacccagagggaactggaggacgagacggggcgcaaaccatccgagaggctgagcctgcataccatccacggctacttcacccgagccggcatccccagccggcccttcctctacaccgtcacgcccctcacctcctcgcgcaccttcagcaccctctccgtcacggcctaccagccctccgagcccagcaccaacccgcaaggcgaccacttccccctgtccgacgccgccctcccgctctcgccgccctccttcaccggcatgtgctccttcaagctccccgagcccgacagccagggcgtctcgacccaggaggcgcccccgcaggagcgcttcgcctccatcctctcctcccgcgcgcccgaggactggccgcccgtgccgcccctcgacatcaccgccttcgtcgagatcgtgggcgccgacgagcccggcaagttccccgtcgcaaccatgcgcaaggtcgacatgacggcgtacaacgccggccggcccgtgcacgagcgccgcgagctgatgctctacaagctgctcgccccgctgccgacgaccggcggtgacggtgacggcggaggcggcggcggcggcggcggcactggggccgaggagggggaggggaaggggcaggggcaggtatgggacgccaacgcgcacgtcattgcgcacgcgtacgtcgccgaccggaacgggctgctgctggcgggcaaccacgtcgggttcgggcacgcgctcgcgcgggccgcgacgctgagctacacgttcgtggtgcacgtcaacgccgagctggccgtcatgcgggaggaggacggctggtgggtgcaggagatgttcttcccgcgcaccgccgccggccgcggcatcgtcgagagcaagatctggagccccgccggcgtccacgtcgcgaccgagtaccaggacggattggtgcaggggagggggctcggcaagctgtag

SEQ ID NO: 266 - protein, 387 aa, Myceliophthora thermophilia
MPSDDKTLLPLQEALNLVKLAAEGDSRRYMGTRAAYLPGADLSPDKGMLSTHKAAFGGHVYGQAALAVARTQRELEDETGRKPSERLSLHTIHGYFTRAGIPSRPFLYTVTPLTSSRTFSTLSVTAYQPSEPSTNPQGDHFPLSDAALPLSPPSFTGMCSFKLPEPDSQGVSTQEAPPQERFASILSSRAPEDWPPVPPLDITAFVEIVGADEPGKFPVATMRKVDMTAYNAGRPVHERRELMLYKLLAPLPTTGGDGDGGGGGGGGGTGAEEGEGKGQGQVWDANAHVIAHAYVADRNGLLLAGNHVGFGHALARAATLSYTFVVHVNAELAVMREEDGWWVQEMFFPRTAAGRGIVESKIWSPAGVHVATEYQDGLVQGRGLGKL

SEQ ID NO: 267 - DNA, 783 bp, Myceliophthora thermophilia
  CDS (1)...(783)
atgttgtcgggacttggggcagccgcccggtggttgatcacgttcgctttgaacaaaagtcctggcctccactggcgccagaggttggcattgacatttctgcaagcccagcgagccgctttcccaatccgtcatctccggtggctcacgcgacgcgtctcgacgggggaggcagtcgtgcgatattgttcgaaaaataagattccgcacaagtctgttgtcatcgacagtcccgctgccgcgtctggcattgagggtgtgcctgcggcaaccctccatctcctcactgttccgatagttgaggaggacgtacctggccgtaccttcctgtacttccacggcggtggcttcgtcaaccctcttcgcgacgttgcccacatgcctttcatcatgcaatgtgctgaggcatgtcacgccagacaagctgttatcctcgagtacgcgctcgctccagagcatccgtatcccgcgcagctagtgcagtgcgtcgcgacgctgcagtatcttctcggagagatgaagctccgtccggaagatattgttcttgcgggggacagtgcgggcgggcagttggtcggggcgctgctcgcgcatttggcacaaccgtcgccctacgccgcggccattacggttgacggccagttccgagctgcgctcttcgtgagcccgtttgtgaggatgcccccagatgaggggagctacgaggcaaatcacgggaaagattacctaaaccgcccccaggtggaccgcttcatgtcggcttggaaggggtcgaaagactag

SEQ ID NO: 268 - protein, 260 aa, Myceliophthora thermophilia
MLSGLGAAARWLITFALNKSPGLHWRQRLALTFLQAQRAAFPIRHLRWLTRRVSTGEAVVRYCSKNKIPHKSVVIDSPAAASGIEGVPAATLHLLTVPIVEEDVPGRTFLYFHGGGFVNPLRDVAHMPFIMQCAEACHARQAVILEYALAPEHPYPAQLVQCVATLQYLLGEMKLRPEDIVLAGDSAGGQLVGALLAHLAQPSPYAAAITVDGQFRAALFVSPFVRMPPDEGSYEANHGKDYLNRPQVDRFMSAWKGSKD

SEQ ID NO: 269 - DNA, 311 bp, Myceliophthora thermophilia
  CDS (1)...(309)
atgtccaacaccttcggcctccgccggcttctcagcctcgcgctgggcgcaagctgcatcgcggtcgcgtcatgtcgaaaccactgggtcgacatctgggcttcaatgccccaggaagtagaaccgtacaacctgcccaatcccccttataacggcaccgatggcgtgttccagaacacgacgatccgcacgaccgtctacgtgacccaagacgcgtcgacgatccggctccagctcagcaacgcctttggcggctccgacctgcccatcacggcggccaccatcgcgctgcctgccaacggcaccgccgg

SEQ ID NO: 270 - protein, 103 aa, Myceliophthora thermophilia
MSNTFGLRRLLSLALGASCIAVASCRNHWVDIWASMPQEVEPYNLPNPPYNGTDGVFQNTTIRTTVYVTQDASTIRLQLSNAFGGSDLPITAATIALPANGTA

SEQ ID NO: 271 - DNA, 2415 bp, Myceliophthora thermophilia
  CDS (1)...(2415)
atgagggcctcaccatcgtcaaggacgcttctggcgtctctcgccctgtcatctctcccactctcgtttggccagctctcaatccctacggaccttccggactcctgggagtaccagggatgctacaccgatgtgcctggccggaccatcaacagtgcctcgtatgccgatggcaccaacatgacaaatgcggcctgcctcagttactgcgcctccaagggcttcccgtatgccggcaccgagtactcggttgagtgcttctgcggcaccactctcgcctcctcttcggcgaaggtcgccgattcggaatgcaatatgccttgctcgggagcccccagcgagccctgcggagctgggagcaggctgtcgctcttccactccagcgccgtgaccggaccagcagcgaacccaggggtcaacgacttcacccacctgggctgctacgccgagggcaagaccggccgtgcccttacctacaaccccggccttccgggggcggacatgacggtcgccaagtgcacggctgcctgccgcgcggccaactatatcctcgccggcgtcgagtacgggggagaatgctactgcggtaacacgattgccaacggcggcgcccccgccgacagcgggtgtagcatggtctgcaacggcaacagcaccgagttctgtggtggccctgaccgtctcaacgtgtatagctacaagaatcagtacgagccaacggccacctcgaccacgggcgccgggtcgacctcgagctcctcggtgccgtcggcgaccggcctccccgagggatggtcttaccagggatgctggatcgacgggaagcaggggcgtatcctgccgtaccagctcccggacagccagaccaacagccgggcggcttgcgcaaacgcctgcgccgaggccggttacaccgtctccggtaccgagtacgctgtccagtgcttctgcggcgatgccatccacaacggaggtgtcgagaccgacgaggccgactgcagcactccctgccccggcgccccgggcgagaagtgcggtgccggagaccgcctgagcatcgtctccagggggccgcccaagatctacgcccctccggccccgattgagaagatcggcgactgggagtaccagggctgcgccgaggacaacatcaacgacaagcggaccttcttctggcagatcttcttcaacgacatcatgacgcccgagatgtgcctggaccgctgcgccgagttcggctaccacgctgccggcctcgagtacgggcaggagtgctactgcggcgacccggccaacatggccacccacggcgccaccttccggccggagagcgagtgcaacgtcgtctgcgccggcaactcgaccgccatctgcggcggcctcgcccgcctcaccacctacttctggatcggcaccccgttctactcgtgggacttcccgcaggactggcgggccggcaagtacgagttcctggtcgacggcgtcaacatcccgctcatcacccacgagacgatcaccggcaaggtctccttcatctccaagggcgccaccggcccgggcaacgagacgggcgcgtacgagtttgaccccgccacgctcgagttccgcgagctccacatcaagacggacgtcttctgcgccgccagcgtcaccctgccggacaaggccggccggcagctcaacgtcggcgggtgggccggcgaggccacctacggtacccgcctgtactggcccgacggcgcccccggcgtccccggcacgcacgactggcaggagaacgtcaacgtgctccacctccaggccggccgctggtaccccagcgtcctggtgctgaccaacggttccgtcatggtcgtcggcggcctgatcggctccaacgacgcggccacgccctcgatcgagatcctgccctacacgggaacgccgccgctgtacatggactggctggaccgcacccaccccaacaacctgtatcccttcctctgcatcctccccggcggcggcatctttgtccagtactggaacgaggcccgcatcctcgaccccgtcaccttcgacaccgtcaagaccctccccgacgcccccggcgcccccaacgaccccaagggcggccgcacgtacccgctcgagggcaccgccgtcctgctcccgcagaagtacccctacaccgacccgctcggcgtgctcatctgcggcggctcgaccgaagggcccggcaacgcgctcgacaactgcgtgtccatctacccggaggcggacgagcccgagtggcagatcgagcgcatgccgtccttccgcgtcatgacctgcatggccccgctgccggacggcacctacctgatcgccaacggggccctgcacggcgtcgccggcttcggcctcggcgtcggccccaacctcaacgcgctgctctac

SEQ ID NO: 272 - protein, 805 aa, Myceliophthora thermophilia
MRASPSSRTLLASLALSSLPLSFGQLSIPTDLPDSWEYQGCYTDVPGRTINSASYADGTNMTNAACLSYCASKGFPYAGTEYSVECFCGTTLASSSAKVADSECNMPCSGAPSEPCGAGSRLSLFHSSAVTGPAANPGVNDFTHLGCYAEGKTGRALTYNPGLPGADMTVAKCTAACRAANYILAGVEYGGECYCGNTIANGGAPADSGCSMVCNGNSTEFCGGPDRLNVYSYKNQYEPTATSTTGAGSTSSSSVPSATGLPEGWSYQGCWIDGKQGRILPYQLPDSQTNSRAACANACAEAGYTVSGTEYAVQCFCGDAIHNGGVETDEADCSTPCPGAPGEKCGAGDRLSIVSRGPPKIYAPPAPIEKIGDWEYQGCAEDNINDKRTFFWQIFFNDIMTPEMCLDRCAEFGYHAAGLEYGQECYCGDPANMATHGATFRPESECNVVCAGNSTAICGGLARLTTYFWIGTPFYSWDFPQDWRAGKYEFLVDGVNIPLITHETITGKVSFISKGATGPGNETGAYEFDPATLEFRELHIKTDVFCAASVTLPDKAGRQLNVGGWAGEATYGTRLYWPDGAPGVPGTHDWQENVNVLHLQAGRWYPSVLVLTNGSVMVVGGLIGSNDAATPSIEILPYTGTPPLYMDWLDRTHPNNLYPFLCILPGGGIFVQYWNEARILDPVTFDTVKTLPDAPGAPNDPKGGRTYPLEGTAVLLPQKYPYTDPLGVLICGGSTEGPGNALDNCVSIYPEADEPEWQIERMPSFRVMTCMAPLPDGTYLIANGALHGVAGFGLGVGPNLNALLY

SEQ ID NO: 273 - DNA, 2496 bp, Myceliophthora thermophilia
  CDS (1)...(2496)
atggctccgaagattgctattgtctattactcgttgtacggccacatccggcagttggccgaggctgagaaggctggtattgagaaggctggcggcacggcggatgtgtaccaagtccccgaaacgctctctcaggatgtgctggaaaagatgcacgccccgcccaaggcagccgacatccccgtcctcgaggatcccagcgtcctggagcagtacgacggcttcctcttcggcatccccacgcggtacggcaacttccccgcgcagtggaagacgttctgggataagacaggcaagctgtggacctctggtgccttccatggcaagtatgccggtctcttcatctcgacgggcagcctgggtggtggtcaggagtcgacggccatagccgtccagagcacgttggcccatcacggcatcatctacgtccctctcggctacgccaaggccttcggcatcctgaccgatttgtcggcggtccgcggtggatcggcctggggtgccggtaccttcgcgggcgtcgacggcagccgccagccgagcgaggccgagaaggagctggccatcatccagggcgagtggttctacaagacggtcgccagggctgttggaggcctggcggagagcacgggtaacaccgtgccaacgcaggctgctgcgacgccggacacgaagaagagggaggagccgaaggaggatcgtggtcctgccaagaaggagtcggctaaggaaggcccctgtggactacccgtcaagtgcacgataatcaaggcgctgctgggcaaggccggcctgctgccggtgggcgtggtggacgtggagggcaactttgcgcagcacgaggccgtgaggctctgcgtggtggagaggaggaagaagaagaagaagaagaagaaggggcagaggaaagacggaaaagggacggccaagggaggtaggagccaaggagattcgggggcgcagaacagcggggaagagaacgaggagaaaagggagaaggaaaatgaaattcctgatagggaaccgggtgatgaggaggatgggagcgaggtcgatggcagcgacggtgacgataatttcgcagatgagaatggcacggtcgaagtagcctggatctgcattctcccgtgcgaattcgacgcggccaaggtgcttctagatgcgcgatacgacgacgtgacgtccgccaccggggagaagtacgtcctgggccggatgggccgtcacaacgtcgtgatcggttgctttcccgccggatttctgggtacggcccaggccgcgagggccgcactcagtatcaaatacgagttcccaaacgttcggttctgtctccttgttggggtcgccgggggctgccccgaccccaaagataaggacaaggacgtccgtctcggcgacgtggtcgtcagtgagccgaaggggaaccggggcggagtcgtgaaagtcgacgcgggcaagaataccgatggcggattcaagatcttctcccacctcaacaaggttcacggtgaacttctctccgcaatccagtcgctcaagagcgaccaccgcacaaagcggaccagggcaatggacgaatacatgagcgcggcgatggccagttccgaggactactcggatccggggtattttaaacggcccccgccagagagcgatcgcctattccgatccgactacccgcacccgtctggagaacccgactgcaagaattgtagcaacgaccacgtcctgagcaggcagcagcgggcacaagtgggcggcggtagaagtgcggcggcagattcccccaagatctggtatggcacgatcggcacgggcgaccacgtcctacggtccgcgcgggagcgcgaccggttgagccgcgaggaaggtatcctgtgcgtggagatggaggcggggggcgtgatggaaacgctaccggcgctggtggtgcggggcgtctgcgactacgccgatagccacaagaacaagcagtggcagccatacgcggccctcgccgcggccgcctacgccaaggacctgctcacctacgtggagaaggcggccggccccggcgcgggcccccacggcgcccactgcgtcctcggtaccgtcccgctcgacgcggtccagcgcgcctttgccgccgacccggtcggcttccgcgaggacctgaggaaactgggcaccgccatgtcgaacacgaagctccatttctccacccagcgtctgccgctcttccacgagttcttgcggaagcacggcctcccgaagacgattagcaactgggtggcggcggcgcaccagaaccagctgttcggcgggtacagcattgacagtgccaaagccgtccgtgacgacgaccggagggacccgcgcgagcggctcgcggcggcgcgggccgtcgcattcctctacgccaaccaaaactccctggccacgacgtacttggtgcaggacaccgtcttgaggatttgggactacgtcgagtcaggggatcgtgaggcacctaggtaa

SEQ ID NO: 274 - protein, 831 aa, Myceliophthora thermophilia
MAPKIAIVYYSLYGHIRQLAEAEKAGIEKAGGTADVYQVPETLSQDVLEKMHAPPKAADIPVLEDPSVLEQYDGFLFGIPTRYGNFPAQWKTFWDKTGKLWTSGAFHGKYAGLFISTGSLGGGQESTAIAVQSTLAHHGIIYVPLGYAKAFGILTDLSAVRGGSAWGAGTFAGVDGSRQPSEAEKELAIIQGEWFYKTVARAVGGLAESTGNTVPTQAAATPDTKKREEPKEDRGPAKKESAKEGPCGLPVKCTIIKALLGKAGLLPVGVVDVEGNFAQHEAVRLCVVERRKKKKKKKKGQRKDGKGTAKGGRSQGDSGAQNSGEENEEKREKENEIPDREPGDEEDGSEVDGSDGDDNFADENGTVEVAWICILPCEFDAAKVLLDARYDDVTSATGEKYVLGRMGRHNVVIGCFPAGFLGTAQAARAALSIKYEFPNVRFCLLVGVAGGCPDPKDKDKDVRLGDVVVSEPKGNRGGVVKVDAGKNTDGGFKIFSHLNKVHGELLSAIQSLKSDHRTKRTRAMDEYMSAAMASSEDYSDPGYFKRPPPESDRLFRSDYPHPSGEPDCKNCSNDHVLSRQQRAQVGGGRSAAADSPKIWYGTIGTGDHVLRSARERDRLSREEGILCVEMEAGGVMETLPALVVRGVCDYADSHKNKQWQPYAALAAAAYAKDLLTYVEKAAGPGAGPHGAHCVLGTVPLDAVQRAFAADPVGFREDLRKLGTAMSNTKLHFSTQRLPLFHEFLRKHGLPKTISNWVAAAHQNQLFGGYSIDSAKAVRDDDRRDPRERLAAARAVAFLYANQNSLATTYLVQDTVLRIWDYVESGDREAPR

SEQ ID NO: 275 - DNA, 699 bp, Myceliophthora thermophilia
  CDS (1)...(699)
atgcacctcctcgctcttggattcgtcaccggccttgctgccacagtggacgcacaggtggtcaaagttatgctgcttggcgactccataaccgagatcacctgctggaggccgctggtgtgggagcagatcgctgcggccgggctggcgggcgacgtcgatctggttgggaccatgagcgacctcgacggccgctgctcgcgcccctcgggcttcgacccggaccacgagggccactcgggctggcaggcctacgacattgcccggaacaacatcgccggctgggtccggagcgcccggccggacgtggtccagttcatgctcggcaccaacgacgtcaacatcggcaagcgcgacgtccagtccgtcctcgattcgtacaccatcatgctcgacgccatgcgtgacgcgaatcccaacgtcaaggtcattatcgacaagctgatcccgacaagctggagcgacgcgaccatcgaggccatcaacagcgccatccccggctgggcggcggcgcactcgacggcgcagtcgcccgtcgaggtggccgactgctcgcgcgccgccggcttcaccaacgacatgctgcaggccgacggcgtccaccccaacgagctgggcgaccgcttcatcgccgagcaggtcgggccgaagctgatccagttcatcagcgacgctcgtgctcgtgtccggaactattag

SEQ ID NO: 276 - protein, 232 aa, Myceliophthora thermophilia
MHLLALGFVTGLAATVDAQVVKVMLLGDSITEITCWRPLVWEQIAAAGLAGDVDLVGTMSDLDGRCSRPSGFDPDHEGHSGWQAYDIARNNIAGWVRSARPDVVQFMLGTNDVNIGKRDVQSVLDSYTIMLDAMRDANPNVKVIIDKLIPTSWSDATIEAINSAIPGWAAAHSTAQSPVEVADCSRAAGFTNDMLQADGVHPNELGDRFIAEQVGPKLIQFISDARARVRNY

SEQ ID NO: 277 - DNA, 1452 bp, Myceliophthora thermophilia
  CDS (1)...(1452)
atgggctcgctgcgcggtctgctcgagggggtcgtcgacaccgccctcgactcgctttacacagcaacaggtagtttgacgcagagcaggacaaatggcctctcgctcctggggactctcttagcccctaccttacctctcttcctaaccaacaactctttgccagatgggtacccgtggggggagctgaccgacgagggtaccaacccgtacacggagtgccccaggaccggcgtgacaagacactacgacttcacggtgagccgggcttctatcgctcccgacgggtacctacgcgatgtgctcctcgtcaacggggccttccccgggccgctggtcgaggccaactggggcgacacgatcgtggtggatgtccataacgacattaccgggccggaggagggcacagcaatccattggcacgggtttttgcagcacgggacgccctgggaggacggcgttcctggcataacccaatgtccgatcccgcccaggagaagctacaggtatgagttcgtcgctagtctttacggcacaagctggtaccactcccactactcggcccaattcgccggcggtctcttcgggcccattgtgattcacggcccaacgcgcgagaattacgatatcgacctcggtcccatcctgctcaccgactggtaccacagagaatatttcgacatcatcgaggaaatgctcgctcctggcggcagcgccaaggtggtgtcggacaacaacttgatcgacggcaagatgcatttcgactgctcgactgtcgctccaggggataacactccgtgcttcgacaacgccggagtctccaagttcaggtttcagacgggcaagacgcataggctgcgcctgatcaacggcggtgctgacggcgttcagcgcttctcgatcgacgagcacacactcaccgtcatcgctgaggactttgtaccggtgaaaccctacaacacctcggtggtcaccctgggggtcggtcagcgcgccgacgtgctcgtcacggcaaatgtcggcgagcccacctcggccttctggatgcggtccaacctgtcgtcgtgcctgccggcgcggcaaccctatgccgtggcggccgtctactatgaccaagcggacacttcaaccacgccatcgagcagggcctgggacgtcctcgaccccggaacgtgcacaaatgacgacctcgacatcaccgagccgctgtttcccatcccactgcccgaaccgaccctgacccataccatggacatcgagctcttcaccaacgcctccaacgtgacgctgtggaagttcaacggcgtctcgatgcgtgccgactacaacagtcccgtcctcctgctggccaacgacggcaatttcacctacccaccccagtggaacgtggtcaaccagcacaaccacacggccatccgcatcatcgtgaacaacaggagccccagcgcgtga

SEQ ID NO: 278 - protein, 483 aa, Myceliophthora thermophilia
MGSLRGLLEGVVDTALDSLYTATGSLTQSRTNGLSLLGTLLAPTLPLFLTNNSLPDGYPWGELTDEGTNPYTECPRTGVTRHYDFTVSRASIAPDGYLRDVLLVNGAFPGPLVEANWGDTIVVDVHNDITGPEEGTAIHWHGFLQHGTPWEDGVPGITQCPIPPRRSYRYEFVASLYGTSWYHSHYSAQFAGGLFGPIVIHGPTRENYDIDLGPILLTDWYHREYFDIIEEMLAPGGSAKVVSDNNLIDGKMHFDCSTVAPGDNTPCFDNAGVSKFRFQTGKTHRLRLINGGADGVQRFSIDEHTLTVIAEDFVPVKPYNTSVVTLGVGQRADVLVTANVGEPTSAFWMRSNLSSCLPARQPYAVAAVYYDQADTSTTPSSRAWDVLDPGTCTNDDLDITEPLFPIPLPEPTLTHTMDIELFTNASNVTLWKFNGVSMRADYNSPVLLLANDGNFTYPPQWNVVNQHNHTAIRIIVNNRSPSA

SEQ ID NO: 279 - DNA, 333 bp, Myceliophthora thermophilia
  CDS (1)...(333)
atgcatctccacggtcacaatttctacgttctccacgagggcccgggagaatgggacggcaccatcgtccgtccgtcgaacccccgcaggagagacgtgtactcggtacggagcaagggccacttggtgattcagtttgacggcgcgcccggcgtctggcccttccactgccacatcgcttggcacgtgtccggcggcttcatggcgacgctgatcgtcaagcccgacgaggtggagcgcatggagatcccccgcgacgtggagaagaactgtcgggcgtgggcgatgtggtccaagtataacgtcgtagaccagatcgatagcgggacttga

SEQ ID NO: 280 - protein, 110 aa, Myceliophthora thermophilia
MHLHGHNFYVLHEGPGEWDGTIVRPSNPRRRDVYSVRSKGHLVIQFDGAPGVWPFHCHIAWHVSGGFMATLIVKPDEVERMEIPRDVEKNCRAWAMWSKYNVVDQIDSGT

SEQ ID NO: 281 - DNA, 165 bp, Myceliophthora thermophilia
  CDS (1)...(165)
atgcctgtcccctttctggggcgcctcaacgtcaccgaatatgctgccctcgtcggatccttccttctcgtaggccttgaggccttcgtccgcattttcacgctcgcgctacgtgagcacccgcccctgaccatcaacaacgccccgccccgctcgcccgtctaa

SEQ ID NO: 282 - protein, 54 aa, Myceliophthora thermophilia
MPVPFLGRLNVTEYAALVGSFLLVGLEAFVRIFTLALREHPPLTINNAPPRSPV

SEQ ID NO: 283 - DNA, 1935 bp, Myceliophthora thermophilia
  CDS (1)...(1935)
atgccgcttcgaattacgacatggaacgttaacggcattcggaatccgtttagctaccaaccatggcgcgaaaaccgcacattccaggccatgttcgacactctggaagcggacatcgttgtgttgcaggagaccaaaattcagcggaaagatcttcgggacgacatggtgttggtgccgggctgggacgtcttcttcagtctccccagatacaagaaaggctactctggtgtggctgtctatacccgctcctccaagtgctgtccgattcgcgcagaagagggcatcactggcgctctttcccccccaaactcctcgaccaagttccgagatcttcctgcagaccagcaaattggcggatacccgcttcctgagcaactctcgaattctattgacgaacaaacgctcgactcggaggggcgctgcattatcctagagttccctgccttcgtacttatcggcgtatacagccctgccacccgagatgagacaaggacagaatatcgcgaggcgtttatcgatgctatggatgccagggtccgaaatcttgttgccatgggcaagcaagtctttctctgcggtgacctaaatatcatacgtgatgagctagacgctgcaggcttgccagaacgcctgcggaaagaaggcgtgacgctggaagaattcttcgcaacgcactcacgacggtttttgaaccaactgctgtttggcggccgcgtcatcggagagagacaggaagggcgtgaacagcccgttctatgggatctctgcagggagttccatccaactcgtgcgggtatgtacacctgctgggaaacgaggaagaacgcgcggccagggaactttggaaaccggatagattatgtgctgtgcagctctggaattaaggactggttcatcgactccaatatccaggagggcctgctgggatccgatcactgtcccgtatatgctacgattgccgacactgtcgatgtcggtggctcccaggttcacattgaggatatcatgaaccctccgggcatgttcaaggacggcgtgcgccaacgagaatggtgccagaaggacctccttcctatatcagccaagctcatccctgagtttgaccgccgacagagcataaaggacatgttcttcaagaaagcctccgcgtcggcgaagacgacatccagtcccaacacgattagctcccaaagtacacccaccgacacggtaccgggcggagggagcgacgagacacaaaaagatagcaccgtctcaatgtcgcaggcgattgatcagccagcatctacaacgacgctccccaacacagcttcgaataacatcacttccgtgccaccacaaaagcccatcccccaaaagcggcaagccgcatcctcaacgtctccgaaccggcctcagaagaagggaaaacttgcgctcagcagggaaagctcctcgaagacgaccgcaggcttttcgcagagcagcttgaaagggtttttcaagcccaagacaccgaccgcaaacgccacagctgccattgaggccggtgacaccacaaatcctgccatcactcccgacccaaatccatcggagcctgaatcaaagcaagatacctccgccagtcaagggaatagcagccaaagtaccaagaatagctctggagactctgtcggtgagagcccgaggaccgagagctccttcacagataaggtcttcgaccccatccaagcgaaggattcctggtctaagttactcgggaagcgagtggttccaaaatgtgagcacggagaggattgccagatgctggtcactaagaaggccggtgtcaattgcggcagggcgtttttcatgtgcgcccgtcccttgggcccctcgggagagaaagagcaaggaaccgagtttcgttgccggactttcatttggagcagtgactggaatgggcgacaatga

SEQ ID NO: 284 - protein, 644 aa, Myceliophthora thermophilia
MPLRITTWNVNGIRNPFSYQPWRENRTFQAMFDTLEADIVVLQETKIQRKDLRDDMVLVPGWDVFFSLPRYKKGYSGVAVYTRSSKCCPIRAEEGITGALSPPNSSTKFRDLPADQQIGGYPLPEQLSNSIDEQTLDSEGRCIILEFPAFVLIGVYSPATRDETRTEYREAFIDAMDARVRNLVAMGKQVFLCGDLNIIRDELDAAGLPERLRKEGVTLEEFFATHSRRFLNQLLFGGRVIGERQEGREQPVLWDLCREFHPTRAGMYTCWETRKNARPGNFGNRIDYVLCSSGIKDWFIDSNIQEGLLGSDHCPVYATIADTVDVGGSQVHIEDIMNPPGMFKDGVRQREWCQKDLLPISAKLIPEFDRRQSIKDMFFKKASASAKTTSSPNTISSQSTPTDTVPGGGSDETQKDSTVSMSQAIDQPASTTTLPNTASNNITSVPPQKPIPQKRQAASSTSPNRPQKKGKLALSRESSSKTTAGFSQSSLKGFFKPKTPTANATAAIEAGDTTNPAITPDPNPSEPESKQDTSASQGNSSQSTKNSSGDSVGESPRTESSFTDKVFDPIQAKDSWSKLLGKRVVPKCEHGEDCQMLVTKKAGVNCGRAFFMCARPLGPSGEKEQGTEFRCRTFIWSSDWNGRQ

SEQ ID NO: 285 - DNA, 1179 bp, Myceliophthora thermophilia
  CDS (1)...(1179)
atgaggctcaccaggtatgccccggtgctgtcggcagccgtgttggcagcagcggcctcagtcccggcagccgggaatctcgacattgtcaagaatctggctcatcgcatgggtgaagaggacatggacgcgttcccagtgttatcgtgggacgaggctgtggccatcatgacggggaatgacgagggcggcggcagcagcagcagcagcagcagcggtagcggtcgcggtcccgacaacaacagggtctcggtcaacaactacagcaacaagaccaagcccgcctacccccccgcctacgtcccccacgcgtcctcctgcgggaagcccaaggtccgggtcgagtggaagaagctgaaagagtcggaaaagtttgcgtacctgggggcggtcaagtgcctgatggacacgaagccggtcggcgtctggtccaaggcgacgagcatctgggacgagatggcatgggcgcacaacgaggccaaatggaacatccacgagaccgacaacttcctgccctggcaccgctactacatctacatgctcgagacgctcctcagcaagcactgctcctaccgggggcccatcccctggtggcgcgagaccgacgacaccggcaacttggccggggccaatctgttttcgcccaactacttcggctcgctacccccccggacggaagacggtaagaccacatgcattaccgacggctggtttgccaacaccacggtccttctcgggcccggcgctccgacttgcctcgcccggggcgaggataagagaatcgccgccgaggtgacgacggccgccctggacctgtgccaaggcgacagagacaccaagtacgagaggcaccgtcgctgcgttgaggccaccatccattcctccacgcaccgggccgtcggcggcgcaatggaaagcatcagcgcctccccgagcgaccccgtcttctacctccaccacggtttcgtcgactggcagtgggcgcgctggcagaacgtcgaatccagccgcaagaccacaatttccggctgctccgagccttccccggtccctggcaaatgtgtggagctcaccctagacacggtactgaagggatatggcttgatacccgacatgaaggtccgcgacgttctcgacatcgaaaacggaatcctgtgctacacctatgacgagttttga

SEQ ID NO: 286 - protein, 392 aa, Myceliophthora thermophilia
MRLTRYAPVLSAAVLAAAASVPAAGNLDIVKNLAHRMGEEDMDAFPVLSWDEAVAIMTGNDEGGGSSSSSSSGSGRGPDNNRVSVNNYSNKTKPAYPPAYVPHASSCGKPKVRVEWKKLKESEKFAYLGAVKCLMDTKPVGVWSKATSIWDEMAWAHNEAKWNIHETDNFLPWHRYYIYMLETLLSKHCSYRGPIPWWRETDDTGNLAGANLFSPNYFGSLPPRTEDGKTTCITDGWFANTTVLLGPGAPTCLARGEDKRIAAEVTTAALDLCQGDRDTKYERHRRCVEATIHSSTHRAVGGAMESISASPSDPVFYLHHGFVDWQWARWQNVESSRKTTISGCSEPSPVPGKCVELTLDTVLKGYGLIPDMKVRDVLDIENGILCYTYDEF

SEQ ID NO: 287 - DNA, 369 bp, Myceliophthora thermophilia
  CDS (1)...(369)
atggcaaaccttagccagctcaagcgccggaccagagccgattacccctacattcttgagtaccgaacgcgatggaccgacaatgacatgtaccaccacatgaataattccatctataacttcctgtacgactcggtcatcaacacctatctcatagaacactgcgggcttaatccgcaatcttctccgcaatatgggatggttgtccactcccataacgactacttctcgtccatctccttcccctcacgtgcagagcttgcgttgcgcgtcaaccgaatcggaaactcgagcgtcacttacgagatcgccctattcgagcatggtaaagaagctgtcaaacggaggcgggctaagcgtgacgagtag

SEQ ID NO: 288 - protein, 122 aa, Myceliophthora thermophilia
MANLSQLKRRTRADYPYILEYRTRWTDNDMYHHMNNSIYNFLYDSVINTYLIEHCGLNPQSSPQYGMVVHSHNDYFSSISFPSRAELALRVNRIGNSSVTYEIALFEHGKEAVKRRRAKRDE

SEQ ID NO: 289 - DNA, 912 bp, Myceliophthora thermophilia
  CDS (1)...(912)
atgcgaccccagacacctcccacgctcctgagcacgctgttcttcacgtattacgggctagccatgcgggggcaagggctgtattacacagacatccacacaagcatccgcttctacggccatggcgaacctggtggctacctcttcggcatggtgatcccccggcgaccgaccacagacttcgtcgcgcaactcgtagcgccccttaaccacagcgatgggtggggaggcgtgagcctgggagattccatgaccggtccgctcctgcttgttacctgggccaacggcagcaatgtaatgacggccgcccgcatggccgacgctcacagcgcagccagcgttgtcccatacacagccagtccgataaccgtatcccccatcaaggcggggaccttcgccaacagcacgcacgtctcctccaccttcctctgtaagggctgcatcaacagcgactccttcgacccaggcagggccggcgaggaaggccgccacgtcttcttcgggtacgcctattccagaacagccgtcgaggatccttccgacatcgacaccgccctctcggaccacaccggcagaggcggcgggtatggagggttcagggtggcgctggaccgcgtcaagtcggacgcgtatcatcactacgccgggatggcggagatcggtatctacggcgtcaagcccgaagctccacacccgtcggctccgaccacgacttcgacctctgcgccgagcccagattccacctccgcagcccctgctgctaccacggacgagtgggagaacgggtgctatgaggatgaatgtgagatgccgaccggacccgactacagtcacagggagatatcgtggctggagttgttcggattggcggcgcttgtcgtgatataccttctccaaccgttcattagttga

SEQ ID NO: 290 - protein, 303 aa, Myceliophthora thermophilia
MRPQTPPTLLSTLFFTYYGLAMRGQGLYYTDIHTSIRFYGHGEPGGYLFGMVIPRRPTTDFVAQLVAPLNHSDGWGGVSLGDSMTGPLLLVTWANGSNVMTAARMADAHSAASVVPYTASPITVSPIKAGTFANSTHVSSTFLCKGCINSDSFDPGRAGEEGRHVFFGYAYSRTAVEDPSDIDTALSDHTGRGGGYGGFRVALDRVKSDAYHHYAGMAEIGIYGVKPEAPHPSAPTTTSTSAPSPDSTSAAPAATTDEWENGCYEDECEMPTGPDYSHREISWLELFGLAALVVIYLLQPFIS

SEQ ID NO: 291 - DNA, 2127 bp, Myceliophthora thermophilia
  CDS (1)...(2127)
atgaagctactcagccgcgttggggcgaccgccctagcggcgacgttgtcactgcagcaatgtgcagcccagatgaccgaggggacctacaccgatgaggctaccggtatccaattcaagacgtggaccgcctccgagggcgcccctttcacgtttggcttgaccctccccgcggacgcgctggaaaaggatgccaccgagtacattggtctcctgcgttgccaaatcaccgatcccgcctcgcccagctggtgcggtatctcccacggccagtccggccagatgacgcaggcgctgctgctggtcgcctgggccagcgaggacaccgtctacacgtcgttccgctacgccaccggctacacgctccccggcctctacacgggcgacgccaagctgacccagatctcctcctcggtcagcgaggacagcttcgaggtgctgttccgctgcgaaaactgcttctcctgggaccaggatggcaccaagggcaacgtctcgaccagcaacggcaacctggtcctcggccgcgccgccgcgaaggatggtgtgacgggccccacgtgcccggacacggccgagttcggtttccatgataacggtttcggacagtggggtgccgtgcttgagggtgctacttcggactcgtacgaggagtgggctaagctggccacgaccacgcccgagaccacctgcgatggcactggccccggcgacaaggagtgcgttccggctcccgaggacacgtatgattacatcgttgtcggtgccggcgccggtggtatcaccgtcgccgacaagctcagcgaggccggccacaaggtccttctcatcgagaagggacccccttcgaccggcctgtggaacgggaccatgaagcccgagtggctcgagagcaccgaccttacccgcttcgacgttcccggcctgtgcaaccagatctgggtcgactctgccggcatcgcctgcaccgataccgaccagatggcgggctgcgttctcggcggtggcaccgctgtcaacgctggtttgtggtggaagccccaccccgctgactgggatgagaacttccccgaagggtggaagtcgagcgatctcgcggatgcgaccgagcgtgtcttcaagcgcatccccggcacgtcgcacccgtcgcaggacggcaagttgtaccgccaggagggcttcgaggtcatcagcaagggcctggccaacgccggctggaaggaaatcagcgccaacgaggcgcccagcgagaagaaccacacctatgcacacaccgagttcatgttctcgggcggtgagcgtggcggccccctggcgacgtaccttgcctcggctgccgagcgcagcaacttcaacctgtggctcaacactgccgtccggagggccgtccgcagcggcagcaaggtcaccggcgtcgagctcgagtgcctcacggacggtggcttcagcgggaccgtcaacctgaatgagggcggtggtgtcatcttctcggccggcgctttcggctcggccaagctgctccttcgcagcggtatcggtcctgaggaccagctcgagattgtggcgagctccaaggacggcgagaccttcactcccaaggacgagtggatcaacctccccgtcggccacaacctgatcgaccatctcaacactgacctcattatcacgcacccggatgtcgttttctatgacttctatgcggcctgggacgagcccatcacggaggataaggaggcctacctgaactcgcggtccggcattctcgcccaggcggcgcccaatatcggccctatgatgtgggatcaagtcacgccgtccgacggcatcacccgccagttccagtggacatgccgtgttgagggcgacagctccaagaccaactcgacccacgccatgaccctcagccagtacctcggccgtggcgtcgtctcgcgcggccggatgggcatcacctccgggctgagcacgacggtggccgagcacccgtacctgcacaacaacggcgacctggaggcggtcatccaggggatccagaacgtggtggacgcgctcagccaggtggccgacctcgagtgggtgctcccgccgcccgacgggacggtggccgactacgtcaacagcctgatc

SEQ ID NO: 292 - protein, 709 aa, Myceliophthora thermophilia
MKLLSRVGATALAATLSLQQCAAQMTEGTYTDEATGIQFKTWTASEGAPFTFGLTLPADALEKDATEYIGLLRCQITDPASPSWCGISHGQSGQMTQALLLVAWASEDTVYTSFRYATGYTLPGLYTGDAKLTQISSSVSEDSFEVLFRCENCFSWDQDGTKGNVSTSNGNLVLGRAAAKDGVTGPTCPDTAEFGFHDNGFGQWGAVLEGATSDSYEEWAKLATTTPETTCDGTGPGDKECVPAPEDTYDYIVVGAGAGGITVADKLSEAGHKVLLIEKGPPSTGLWNGTMKPEWLESTDLTRFDVPGLCNQIWVDSAGIACTDTDQMAGCVLGGGTAVNAGLWWKPHPADWDENFPEGWKSSDLADATERVFKRIPGTSHPSQDGKLYRQEGFEVISKGLANAGWKEISANEAPSEKNHTYAHTEFMFSGGERGGPLATYLASAAERSNFNLWLNTAVRRAVRSGSKVTGVELECLTDGGFSGTVNLNEGGGVIFSAGAFGSAKLLLRSGIGPEDQLEIVASSKDGETFTPKDEWINLPVGHNLIDHLNTDLIITHPDVVFYDFYAAWDEPITEDKEAYLNSRSGILAQAAPNIGPMMWDQVTPSDGITRQFQWTCRVEGDSSKTNSTHAMTLSQYLGRGVVSRGRMGITSGLSTTVAEHPYLHNNGDLEAVIQGIQNVVDALSQVADLEWVLPPPDGTVADYVNSLI

SEQ ID NO: 293 - DNA, 1173 bp, Myceliophthora thermophilia
  CDS (1)...(1173)
atgaagctctcaacactaccagcagcactcctgtccttgattctcctggctcaccaggccgccgccgccccgctcggcaacgtcgacgctgaagcggccgcatcccagagaatcctcgagctgcaagctcagtaccagcgaaacgttctagacgccatcagcaaccgcacctcaggctgcacagcccaaaatatccagcgccgccaggaatggagcaccctctccctggctgaccgcgccgctttcatctcggcgatccactgcctcaacgcgctgccggcgcggacgccgcagtccaccgccccgggcgcccgggcgctctacgacgacttcatcgtcgcccacatcctacagactcccttcgtccacgcgtcgggcctcttcctgcccttccaccgccaccttctgcacctgttcgcaggcgcgctgcgcgaccgctgcgactacgccggcccgctgccctactgggactggacggcgagctacgccgacccgcgcgcggcggccgtcttcgacggcgggccgcactcgctcggcggcaacggcgccttcgtgcccggccgcaacggcaccgtcatctccgtccccggcggcgcgcacgtggtcatcccgcccgcgaccggcggcgggtgcgtcacgacggggccgttccgccagggccgcttcgaggtgcgcctcggccccgtcgcgttcgagccccgcggcccgcacggagggctgggctacaacccgcggtgcctccggcgggacctgagcccgcacttcagcctcggcacgcgccccggcgcggtcgtggccttgctggacggctgcgccggcgacctcggctgcctcgtgcgcgacatggacgcccccgggggcgtgcccgggggcgtgcacgcgtccgggcactggcaggtcgggccggacgcgctcgacgtcttcgccagcccgagcgaccccgtcttttggctgcaccacgcccaggtcgaccgcgtctggaccatctggcagggactggacctcgaggggaggacgtatcaggtctggggcacgagcacggcggcgaacgatccgccaagtgacgacgtaacgctcgagacggcaatggactttggcattcttggtgaggcaaagacggtcggtgaggttgcctcgacggtggacggagaatattgctacatgtatgagtga

SEQ ID NO: 294 - protein, 390 aa, Myceliophthora thermophilia
MKLSTLPAALLSLILLAHQAAAAPLGNVDAEAAASQRILELQAQYQRNVLDAISNRTSGCTAQNIQRRQEWSTLSLADRAAFISAIHCLNALPARTPQSTAPGARALYDDFIVAHILQTPFVHASGLFLPFHRHLLHLFAGALRDRCDYAGPLPYWDWTASYADPRAAAVFDGGPHSLGGNGAFVPGRNGTVISVPGGAHVVIPPATGGGCVTTGPFRQGRFEVRLGPVAFEPRGPHGGLGYNPRCLRRDLSPHFSLGTRPGAVVALLDGCAGDLGCLVRDMDAPGGVPGGVHASGHWQVGPDALDVFASPSDPVFWLHHAQVDRVWTIWQGLDLEGRTYQVWGTSTAANDPPSDDVTLETAMDFGILGEAKTVGEVASTVDGEYCYMYE

SEQ ID NO: 295 - DNA, 1497 bp, Myceliophthora thermophilia
  CDS (1)...(1497)
atgagcggtgactacgaggcggctagtccttgcaaccacgtcgacctaccgcagaccctcctcgagcctatcctcacgaggagggcggtccacaagggctggtcgcttcggttcaacaccaggtttctccgtttcacccggccgactccagaaacggtaatctccgaggtcctcgacctaatcacccagaagacgtacaagattgagtctcggtacctcttcggctgcgatggtgctaggagccaagtcgtacgcgagctcggcatccccctcatcaagaagcccgggcaggggctggcattgaatgtgctcgtgcgggcggacctgtcgcatctcattgcgaaccgcatcggaaacctacactgggtcttccgtcccgaggagaccaccgcgcccccttggggatgggccgccattgtacgcatggtgcgaccgtgggacgagtggatgttcatctttcttccagcgccgggctctgaccttactgccgaagcgatggacgccagcgacgaagagtatatggctagggtgagggagtgtatcggcgatgactccgtcaaggccgaactgctccacgtcggaaagtggtggatcaacgagaccgtggccgagtactactcggatggtaacattttctgcctcggtgatgccacacatcgacacccccccttcaacggtctcggctccaacacgtgcatccaagatgcgttcaacctcgcgtggaagattgactacgtcatgtctggcaaggcggggcccaagctgctcgagtcgttcagcaaggagcgccagccggtcggcgtcgacatcatcacgcgcgcaaaccaggggctccgggaccacatccactggcagaggacgctcggcatgctcgagccggacctgaacaagcggctcgagatcctggccgagctggacgacccgggcgagaagggccgcaagcgccggcaggagttccaggcggccatcgagaccacgacgaccgagttccacggcctgggcatcgagatgaaccagcactacgtctcggacgccgtgtacctggctgacgaggccggcccgccgccggcgctgcccgaaggcgcctgcaaggtgaagacgcaccagatcacgacgtatcccggccgccgcctgccccatgtctgggtcaacacgcgggtccccggcaaaccaatctccaccatcgacctcgcaggacatggccgtttctgcctgctgaccggcccgggggggcaggcctggaaggatgccgcccgatccgtctcggaggcgctgggcgtggagatggccagttactcgatcggctggaagcaggattacgaggatatctactttgactgggccaagaagcgagaggtagccgaggacggctgcgtcctggttcgcccagacaggttcgtcgcatggaggtgtaacggtatgattgcaaacccggaagaaaagctgcggctggttatgagaagcgttctcggcttgggccacgttaatggccagtaa

SEQ ID NO: 296 - protein, 498 aa, Myceliophthora thermophilia
MSGDYEAASPCNHVDLPQTLLEPILTRRAVHKGWSLRFNTRFLRFTRPTPETVISEVLDLITQKTYKIESRYLFGCDGARSQVVRELGIPLIKKPGQGLALNVLVRADLSHLIANRIGNLHWVFRPEETTAPPWGWAAIVRMVRPWDEWMFIFLPAPGSDLTAEAMDASDEEYMARVRECIGDDSVKAELLHVGKWWINETVAEYYSDGNIFCLGDATHRHPPFNGLGSNTCIQDAFNLAWKIDYVMSGKAGPKLLESFSKERQPVGVDIITRANQGLRDHIHWQRTLGMLEPDLNKRLEILAELDDPGEKGRKRRQEFQAAIETTTTEFHGLGIEMNQHYVSDAVYLADEAGPPPALPEGACKVKTHQITTYPGRRLPHVWVNTRVPGKPISTIDLAGHGRFCLLTGPGGQAWKDAARSVSEALGVEMASYSIGWKQDYEDIYFDWAKKREVAEDGCVLVRPDRFVAWRCNGMIANPEEKLRLVMRSVLGLGHVNGQ

SEQ ID NO: 297 - DNA, 999 bp, Myceliophthora thermophilia
  CDS (1)...(999)
atggcgattgtcaaaggagtgaagctgctcgtcctcgggtcgctcattgcgacgtcgatcgcgaagtctttagagcgccgattcgagagcggcgacgatgacgacgatgacaccccgctgccgctggtcatttggcatggcctaggcgacacctacgaatccgaggggatgcgccgcgtcgccgagattgccgaagaagtcaaccctgggacgcttgtctaccctattcgagtggaggagaatccgtcccgcgacaggtatgcctcgttcgtgggcaacttgaccgaccacgtagccaaagtctgcgccgacatcgccgcccacccgatcttgtcgactgccccggcaatcgacgccctcggcttctcccagggcggccagttcctgcgcgcctatgtcgagcgctgcaacaaaccacccgtccgcagcctgatcacctttggctcacagcacaacggcatcaccgctttccgcgactgcaagccgaccgactggatttgccgaatcgcgatggcggttcttaaaggcgatgcgtggaccgacacggtgcagaacaagctcgtgccggcgcagtactatcgcaatcccgacgagtacgaaaaatacctggagcattccaacttcctcgccgacatcaacaacgagcgcgagatcaagaatgaagaatacaagaagaacatcgccaagctcgagaactttgtcatgtacatgttcgaggaagacacgaccgtcatccccaaggagacggcctggttcgaggatgtcaacggcaccgagagcacgccgctgcgcgcacgccaactgtatacggaggattggctcggcctgcgcgctctcgaccgcaagggcgggctcaaattccgcacggcgccgggcgaccacatgcagctgtcggaggagctgttgaaggaggcatttggcgacttttatgggccgctgaacctacatcgcggaaggtcggacccgcggccggcgaactggcgcagtgatgatctctga

SEQ ID NO: 298 - protein, 332 aa, Myceliophthora thermophilia
MAIVKGVKLLVLGSLIATSIAKSLERRFESGDDDDDDTPLPLVIWHGLGDTYESEGMRRVAEIAEEVNPGTLVYPIRVEENPSRDRYASFVGNLTDHVAKVCADIAAHPILSTAPAIDALGFSQGGQFLRAYVERCNKPPVRSLITFGSQHNGITAFRDCKPTDWICRIAMAVLKGDAWTDTVQNKLVPAQYYRNPDEYEKYLEHSNFLADINNEREIKNEEYKKNIAKLENFVMYMFEEDTTVIPKETAWFEDVNGTESTPLRARQLYTEDWLGLRALDRKGGLKFRTAPGDHMQLSEELLKEAFGDFYGPLNLHRGRSDPRPANWRSDDL

SEQ ID NO: 299 - DNA, 1926 bp, Myceliophthora thermophilia
  CDS (1)...(1926)
atgtcgaccaccgccgcccccgcccgagatctcccagtcatcaccatcccgccctcacccccgcacccccacacccacacgatcatcttcctccacggccgcggagacaacatcaaatccttcacccgggccctgcgcaaatggcactcgtcgcggggcaccaccctattcgacaccttccccacgctgcgatgggtcttcccgcaggcgccaatgcgccaggtggcgagcacggccaacctgccgcggccgcacatcttcccgcagtggttcgatctgtggacagcgcaggacttcagcgagcgcgaggaagtgcaggtcgagggcttgcgcgagagcgtgccgctgatccgcgacatgatcgcgcgcgaggcggcccagctcgggggccgctgggaccgcgtcatcctggcgggcatcagcatgggcggggccacgagcgtgcacacgctgttcaacctggacatccccgcagagggcggcggccggctggcggcgctgctggccttctgcgctcgctgccccttcgcggggaggagcctgcaggggatgcgagaggtgctcgcccttcccggctctcccccggccggggagaacggagtgctgaggcggacaccggtgctgctggagcacagcgcggacgatccgctggtgctgatcgataacggccggcgactgagagacacgctgaaggggttcggagcgcaggtcgagtggagggagtacataactggcggacactggtttcaggagcccgaggggattgatgatgcgatcgagttcttgcagaaaagagccgcagcagcaaccgcagccatggcgacatcagaagcggccatttctcggacagagatcctcgaaaaatacacaagtctcgaccagaggggcattgtcatcgccgaatacgtctggatcgattcagagggcaacacccgctccaagactcgcacccttgagcctcgcgaagacggcaagccctgggatgtcgacacattacccatctggaactttgacgggagctccaccggccaggctcctggcgacaactcagatgtctacctccgcccttgtgccgtctacccggacccgttcaggaagggaaacaacattctcgttctgacggagtgctggaaccacgacggaacccccaacaagtacaactaccgccacgagtgcgcgaagctcatgcaggcccacgccgacgcagagccctggtttggcctggagcaggagtacaccctcttggacttgaacgataggccttatggctggccccagaacggcttccccgcgccccaaggcccctactactgcggtgtcggcgccggcaaggttgtgcagcgcgatattgtcgagagccacctccgcgcctgcatttacgctggcatcaagatctctggcaccaacgccgaggtcagcaagtcacaatgggagttccaagttggcccttgcgttggcatcagcatgggtgatgatctgtggatggcccgttacatcctcgcccgcgtggccgaggactttggtgtcaaggtctcgctccaccccaagctcatccctggcgactggaacggtgccggcctgcacagcaacttctcgaccaaggagatgcgccaagagggaggtatgaaggctatcgaggctgccatcaagaagctagagggtcgccacgcggagcacatcgctgtgtacggcgaggacaacgagaagcgcctcaccggccgccacgagacaggcgccatcgactcatttacctatggcgttgccaaccgcggcgcgtctatccgcattcctcgtgaagtcgctgccaagggctacggttacttcgaggaccgcagacccgccagcaacgccgacccctaccgtgtcaccggcatcctcatggagacgtatgttacaaccaaatcccttccagcgttgtctctgtaa

SEQ ID NO: 300 - protein, 641 aa, Myceliophthora thermophilia
MSTTAAPARDLPVITIPPSPPHPHTHTIIFLHGRGDNIKSFTRALRKWHSSRGTTLFDTFPTLRWVFPQAPMRQVASTANLPRPHIFPQWFDLWTAQDFSEREEVQVEGLRESVPLIRDMIAREAAQLGGRWDRVILAGISMGGATSVHTLFNLDIPAEGGGRLAALLAFCARCPFAGRSLQGMREVLALPGSPPAGENGVLRRTPVLLEHSADDPLVLIDNGRRLRDTLKGFGAQVEWREYITGGHWFQEPEGIDDAIEFLQKRAAAATAAMATSEAAISRTEILEKYTSLDQRGIVIAEYVWIDSEGNTRSKTRTLEPREDGKPWDVDTLPIWNFDGSSTGQAPGDNSDVYLRPCAVYPDPFRKGNNILVLTECWNHDGTPNKYNYRHECAKLMQAHADAEPWFGLEQEYTLLDLNDRPYGWPQNGFPAPQGPYYCGVGAGKVVQRDIVESHLRACIYAGIKISGTNAEVSKSQWEFQVGPCVGISMGDDLWMARYILARVAEDFGVKVSLHPKLIPGDWNGAGLHSNFSTKEMRQEGGMKAIEAAIKKLEGRHAEHIAVYGEDNEKRLTGRHETGAIDSFTYGVANRGASIRIPREVAAKGYGYFEDRRPASNADPYRVTGILMETYVTTKSLPALSL

SEQ ID NO: 301 - DNA, 3633 bp, Myceliophthora thermophilia
  CDS (1)...(3633)
atgttgctgctccatcagacaggcagcgtcaagatcggcgaggtggtccgctataccgtgacttacaagccgtcggtcgaccacatccttccctctcccgagtttctgtacctgcgcatcaagaacacctgcgccatcgcccttcgtgccgcctttgtccatgggccatacaccctcggggtcgccgcataccccgcgacattcaagcccttcgaaaagttcgagaatccgcgtcgatatggcgtgcccgagttcgagcccatgctcaaggccggcgctgtctggaactgccccttgatcgtaccggacaacatccgccagagcgctggcgagggcagcagcaaacatggacactttgggagcgggcccgagcatgatgaggacactgtctcttgggtgattgaggtttcctcccaagtcatcttttccgcctccgcgtcggtgcactatgagatcctgctggcgcgcgacgagaagtcgctgaatcttggctccgtgatgcccgtcatcgggggccaagtgcaagcaccccagcctggccgggtgagcgacttccagcagagcgctggctcatcgaaacaccatcccgcacagcccaagggcgtcttctccaaggcaatacacctcaaagttcaagataccgcagccctgtggaatactccggaaatcccaggttggaacgagattggatggctccgggcgagggaagaggactgctccgacgctcccgccgaagccggcgcggccaccagaaattctggcgaggcaaagcggccgccaaagcaccgacaaaagaagattcatctagttgtgcttacccacgggttgcacagcaatctaggcggcgacatgctgttcatgaaggagagcatagatgcagcagtgaagcaggcaaaggttgacgcgaaagcgcgcaaagcaagggaacgcgcggcaaggcggcgtgcgcgcaagggcgctactacgacgggcgactcttttgaaaggggcgaccagggttcaaacctcgatccgaatctgggactcaaagcgggtactgacaccgctagccgacggaaagaaggcgacgaaggcgagcagctcgaggacgaggaggacgatgaggaggtggacgacgacgaagaagtcattgtacgcggcttttccggaaacgcggcaaagaccgagaggggaatcaaatacctgggtaaacggcttgccaggtatatcttgcttatgacgtttccagatcagccatgcttgcccaccgccaaggcagcttcagaggccatcacccactcgctcaagacaggagcccaaaagaaggccatcgaagaagcacacaagcacagctccgcccacctggcagcctctccgggcggaaaacgtttgtacaaattcaccaagatcagcttcatcggccattccctcggaggcttggtgcagatgtacgcaatagcgtacatccagaaacactcaccgcagttcttcgatcttatcgagccgatcaacttcattgcgctggcatccccgttccttggcctaaaccatgagaatccgctctacgtgaagtttgcgttagactttggcctggtagggaggacaggacaagacctgggcctgacctggagagcgccaacgatcgcccggaatggatggggcgcgctcatgagcaatcttggggagcacgcgcacaagcgcgtatatggagaatatcagcccgagtccaagcccctcctgcggatcctgccaacggggccggctcacaaagcgctcaagaagttccgtaaccgaacggtctattccaacgtggtcaacgacgggatcgttccactccggacaagctgtctcctctttctggactggcagggccttggtcgagtcgaaaaggctcgtcgagaggcagggctcgtgggaacagtcgtggggtttggctgggccgaactgactggagccaacatgacgactcctagactcgctccttggtcgccggccgaacaagaagataaagatgacgctgaaagcgcgggcaagacaactccaaccggtcatgaggattctcaccgggtcccgcagccgccgactaatgccatgctggaagacgatcggcaaagcctgaggtcgatagccaaaccgtaccgagagacaccttcagagctgcagcatcttcagaattcgagcacaaacaacacgtcgaatcctctttccggcatcttcaatttcttccgcagcgagacaccaaaatcgccgcccctggcgtctcctaaaataaacaagatctaccagcggagccagacgctcaaatcggatcagtggccggcctcggattcgggtacctcgtccaaatccagagtgacggctgggaacgagctcagcgaggatgcagagggaatgtcggcgcctccaaaaacgagcatcttcgagtcggctggtgaccttctcaacccaaaactacccccagtcgagtttctcattgatccatcgaaacgtcctcgaactatctttcatgaccgtgtctatcacccggcggacatccccccaccacccgtcaaagagcggccttcgggcactttgagcctacggcgccggacgccagctgcaagctcctcttttctaaaatccaacgacgacaccacctcttcgtcgagatcccacccggtcaaccaaaacgacacctccccggattcaccgcgatcccaacaatccaaacccgcgcccccctctactgccgccagcgacgaagcctcgactgtccacagcccttcttcggacgccactcacggcgaggccgccgctaccgaggacgtcgccgacgtagatatcgacacctcccagatgcgcgtcgaagagaaaattgcgcgcgcctaccaccgcggtctctcgtggcgcaaggttctcgtcaagctcgaacccgacgcgcacaataacattatcgtgcgccgcaccttcgccaacgcgttcggctggccagtgatccagcacctggtcgaagcgcacttcagtgactccgcgacggcgcggctcagagacgaggacgagccgaacgccgaaagggcgaaaccgattggggagggaacggacgaaggtggcggcgagataagggcggctgcgagggggttgaacgcgagaggggaggatgtcagtatcaggaacggaagggatggtgatgaggatgaggatgaggatgagggtgatgctgatgagaaacaggatacggtgtctgagttgccgcaaggcccggggctgtcgccttcgctggccaacgccaacagcaacaacgcgcaaggcgctttccctgcccagtctagcactgctgctggcaagggtagtggcggtacgtcaacgacgacgtggccgccgccggacagggttgattcagtgacgtggagcgatcgagactgggcagatagcggggatgagagtgatgacggggtgggcggaagattgagtggtacgagaaaggaagcggccggcggtgagggaaaggggaaggggattgggctaggaattccgttcggtggcggtgagaggagctccagtccgctgagctggaattggacggagaagatcgttggcaaggggggcctggggcggtcgaagtcgccttctggtgacagcggagctggttctaccgctggaaaggacgccaactga

SEQ ID NO: 302 - protein, 1210 aa, Myceliophthora thermophilia
MLLLHQTGSVKIGEVVRYTVTYKPSVDHILPSPEFLYLRIKNTCAIALRAAFVHGPYTLGVAAYPATFKPFEKFENPRRYGVPEFEPMLKAGAVWNCPLIVPDNIRQSAGEGSSKHGHFGSGPEHDEDTVSWVIEVSSQVIFSASASVHYEILLARDEKSLNLGSVMPVIGGQVQAPQPGRVSDFQQSAGSSKHHPAQPKGVFSKAIHLKVQDTAALWNTPEIPGWNEIGWLRAREEDCSDAPAEAGAATRNSGEAKRPPKHRQKKIHLVVLTHGLHSNLGGDMLFMKESIDAAVKQAKVDAKARKARERAARRRARKGATTTGDSFERGDQGSNLDPNLGLKAGTDTASRRKEGDEGEQLEDEEDDEEVDDDEEVIVRGFSGNAAKTERGIKYLGKRLARYILLMTFPDQPCLPTAKAASEAITHSLKTGAQKKAIEEAHKHSSAHLAASPGGKRLYKFTKISFIGHSLGGLVQMYAIAYIQKHSPQFFDLIEPINFIALASPFLGLNHENPLYVKFALDFGLVGRTGQDLGLTWRAPTIARNGWGALMSNLGEHAHKRVYGEYQPESKPLLRILPTGPAHKALKKFRNRTVYSNVVNDGIVPLRTSCLLFLDWQGLGRVEKARREAGLVGTVVGFGWAELTGANMTTPRLAPWSPAEQEDKDDAESAGKTTPTGHEDSHRVPQPPTNAMLEDDRQSLRSIAKPYRETPSELQHLQNSSTNNTSNPLSGIFNFFRSETPKSPPLASPKINKIYQRSQTLKSDQWPASDSGTSSKSRVTAGNELSEDAEGMSAPPKTSIFESAGDLLNPKLPPVEFLIDPSKRPRTIFHDRVYHPADIPPPPVKERPSGTLSLRRRTPAASSSFLKSNDDTTSSSRSHPVNQNDTSPDSPRSQQSKPAPPSTAASDEASTVHSPSSDATHGEAAATEDVADVDIDTSQMRVEEKIARAYHRGLSWRKVLVKLEPDAHNNIIVRRTFANAFGWPVIQHLVEAHFSDSATARLRDEDEPNAERAKPIGEGTDEGGGEIRAAARGLNARGEDVSIRNGRDGDEDEDEDEGDADEKQDTVSELPQGPGLSPSLANANSNNAQGAFPAQSSTAAGKGSGGTSTTTWPPPDRVDSVTWSDRDWADSGDESDDGVGGRLSGTRKEAAGGEGKGKGIGLGIPFGGGERSSSPLSWNWTEKIVGKGGLGRSKSPSGDSGAGSTAGKDAN

SEQ ID NO: 303 - DNA, 594 bp, Myceliophthora thermophilia
  CDS (1)...(594)
gaggaggaggaggagggcggggaggtggattggaccgggatcgagtacctctgcgacagggcggtcgagctcgagttcgaaggcggcaggcggctcaacgtgtacgggttcggggcggtgccgcggtgcggcgaggggttcgcattccagtatgacagggacaagcatccatggcggggacgggtgccggaggagacggatgtcttggtgacgcacacgccgccggcttaccacctcgacctcggcctcggctgcgccggcctgctcgacgaggtctggcgcgtcaagcccaagctgcacgtcttcgggcacgtccactacggccacggcaaggaggccgtctactacgacgagtgccagcgggcgtacgagtcgctcatggcgcggccggccgcggggcccctgcgggacctcgtgtcggtcgcccgctggagggacgccttcaacgtgctctggtacggcgtcgccagcatcctgtggaagtggatcatgctcggcccgggcaccaacaacggcgccctcatggtcaacgcgtcgctgatgtacgggaacagcgggcgcctacggaatcctgccatagtggtggatctgtag

SEQ ID NO: 304 - protein, 197 aa, Myceliophthora thermophilia
EEEEEGGEVDWTGIEYLCDRAVELEFEGGRRLNVYGFGAVPRCGEGFAFQYDRDKHPWRGRVPEETDVLVTHTPPAYHLDLGLGCAGLLDEVWRVKPKLHVFGHVHYGHGKEAVYYDECQRAYESLMARPAAGPLRDLVSVARWRDAFNVLWYGVASILWKWIMLGPGTNNGALMVNASLMYGNSGRLRNPAIVVDL

SEQ ID NO: 305 - DNA, 1410 bp, Myceliophthora thermophilia
  CDS (1)...(1410)
atggccccaatttccaaggagaccgacttcctcgtcataggaggcggcagcggaggtctcggcgccgctcgtgcagccagcgcgagatacggggccaaggccatggtcattgagggcaagcggctaggagggacatgcgtcaacgtgggttgcgttcccaagaaggtcaccttcaacgccgccgcgatcgccgaggcgcttcacgacgccaagtcgtacggcttcaacgtgcaagaaaccgccccctttgactggaccacattcaagcagaagcgcgacgcctacgtcctgcgactaaacggcatctacgagcgcaacctggccaacgacaaggtcgaatatgtgcacggctgggccaagcttctctcgcgcaacgaggtcgaagtgacgctcgacgatggcaccaagaccgtcgtcaatgccaagaagatcctcatcgccgtgggcgggaacccgaccatcccgcctcagatccccggggccgaatatggcaccaacagcgacggcttcttcgacatcgacacgctgccaaagaaggtggccctcgtcggcgccgggtacattgccgtcgagtttgcgggcatgttcaacgcgctcggcgtcgagacacacctgttcatccgttacgacaccttcctgcggcactttgatcccatgatccaggagggtgtgaccaaggagtacgagcgcctcggagtcaaggtgcataagcgaagccaggccaagaaggtggagaaggacgagaagacgggcaagctcacgatccactacaaggagggggacgacgagggcgtcgtttccgacgttgaccacctcatctgggccatcgggcgcacccccgcgacggcgggcctcggattggagtccgctggcgtcaaggtcgacgagaagggccacgtggtcgtggacgaataccaaaacacaacggtcgacggcatctatgcgctcggcgacgtgacgggccggtgggagctcacgccggtggccatcgcggcgggccggaggctcgctgcgcgcctctttggcccggagcagttcaggacagcaaagctcgactacacgaacatcccctctgttgtctttgcgcaccccgaggttggcgcgatcggcctgacggagccggaggcgatcgagaagtacgggcgtgagaacgtcaaggtctacaagaccaatttcaccgccctgtactacgccatgatggatcccgaggagaaggcccctacggcgtacaagctcgtctgcgtcggcccggaggagaaggtggtcggtctgcacatcatgggtctcggcagcggcgagattctgcagggcttcggcgttgccgtcaagatgggggctaccaaggctgactttgacaactgtgtggccatccacccgacgagcgcggaggagttggtgacgctgaaatag

SEQ ID NO: 306 - protein, 469 aa, Myceliophthora thermophilia
MAPISKETDFLVIGGGSGGLGAARAASARYGAKAMVIEGKRLGGTCVNVGCVPKKVTFNAAAIAEALHDAKSYGFNVQETAPFDWTTFKQKRDAYVLRLNGIYERNLANDKVEYVHGWAKLLSRNEVEVTLDDGTKTVVNAKKILIAVGGNPTIPPQIPGAEYGTNSDGFFDIDTLPKKVALVGAGYIAVEFAGMFNALGVETHLFIRYDTFLRHFDPMIQEGVTKEYERLGVKVHKRSQAKKVEKDEKTGKLTIHYKEGDDEGVVSDVDHLIWAIGRTPATAGLGLESAGVKVDEKGHVVVDEYQNTTVDGIYALGDVTGRWELTPVAIAAGRRLAARLFGPEQFRTAKLDYTNIPSVVFAHPEVGAIGLTEPEAIEKYGRENVKVYKTNFTALYYAMMDPEEKAPTAYKLVCVGPEEKVVGLHIMGLGSGEILQGFGVAVKMGATKADFDNCVAIHPTSAEELVTLK

SEQ ID NO: 307 - DNA, 981 bp, Myceliophthora thermophilia
  CDS (1)...(981)
atgcttcgcaaaaccgccctcctcgccgtcgccgccctcccggccttgtcggcggcccagatctccaacgactttgagagcgggtgggaccagacggcatggcccatctacgccccagactgcaaccaaggcggcaaggtgtcccttgatacttcgactgcccacagtggcagcaactccatcagggtcgacggtgctggtggttattgcggccacatcttctttggaacgaacaaggtgcctagcggcgatctctacgtgagggtctatctcaaagcgtccaaggccctcaccgcctcccatgtcaccttcatcaccatgccggaccctgcccagggaaccaacaagcaccttcggatcggcggccagagcgagatcctcatgtacaaccgcgagtccgacgacgccaccctgcccgagctctctccgcaaggtatcgccacctcaacctccctgcccaccaacagctggcagtgcttcgaataccacgtcggcaccgacggcaccatcgagacctggctcaacgacaaggccgttgccggcctgaccttcggcccgggcatctccaaccccaacgcgggcgcctggtcgcgcagctccatcatccccaagccctcgggcgtctacttcggctgggagtcgtacggcggcgacacaaacaccttctggtacgacgacatcgtcatcagctcctcccgcgtcggctgctccggcagcggcactcctcctccttcctcctcctcctcctcctcccctaccggccccgccccctccaccactctcgtcacctccaccacatcccgcggctcgaccagcaccaccaccaccaccagctcggcccccgccacctccaccaccagcagcggctgcaccgtgccgcagtggggccagtgcggcggtattaactacacgggatgcacgacatgcgcggccccgtacacctgcaagttcagcaatgactactactcgcagtgcctctag

SEQ ID NO: 308 - protein, 326 aa, Myceliophthora thermophilia
MLRKTALLAVAALPALSAAQISNDFESGWDQTAWPIYAPDCNQGGKVSLDTSTAHSGSNSIRVDGAGGYCGHIFFGTNKVPSGDLYVRVYLKASKALTASHVTFITMPDPAQGTNKHLRIGGQSEILMYNRESDDATLPELSPQGIATSTSLPTNSWQCFEYHVGTDGTIETWLNDKAVAGLTFGPGISNPNAGAWSRSSIIPKPSGVYFGWESYGGDTNTFWYDDIVISSSRVGCSGSGTPPPSSSSSSSPTGPAPSTTLVTSTTSRGSTSTTTTTSSAPATSTTSSGCTVPQWGQCGGINYTGCTTCAAPYTCKFSNDYYSQCL

SEQ ID NO: 309 - DNA, 4632 bp, Myceliophthora thermophilia
  CDS (1)...(4632)
atgagcaccttggatggcgatttggacccactatggcaggacctcgactgggccatcggtcagatgctgattatgggatgggatgggaccgaagtcacaccccagatccgtactctaatcgagcagcatcacctgggctcggtcctgctaacggcaaagaacctcaaatgttccgccgagcaaacggcaagactcgtccaggagctccagaccatcgcccgtcaggccggccatccctaccccctgctgattgccctcgaccaggagaatggcggcgtcaacagcctctttgacgaggactacatctgccagttccccagctccatgggccaggctgccgccagcagtgccgacctggcctacaagatcgccaaggccaccgctaccgaagtctcggccgtcggtgtcaacctgatcttgggaccagtgctggacgtgctcaccaatgcgcgctaccagccgctgggcgtgcgagcgaccggcgacgacccccaagaggtctcccagtacggcatcgccgctatgaacggctacaaggacgccggcgttgccacctgcgggaaacacttcccttcctacggcaacctggattttctcggctccagcttggacatccccatcatcacccagaccctggaggaactctctctgagcgcccttgttcccttccgcaacgccatcgccaccggcaagctggacgccatgtttgtcggtggctgtggcatcgcgaacccgtccatgaacgtcaaccacgcgtgtctgtctgaacaggtggtcgacgacctgctcagaaacgagctcggcttccaaggtgtcgccatctcggagtgtttggagatggagggtctcaggaacgagattggcgtcaaaacgggcacggtcatggcagtcgaggccgggtgcgacttggtcatgctctgtcgcgcctacgatgtgcaactcgaggccatttccggcctgaaactgggcgtggagaatgagctcatcacgaaagagcgcatctacacgtcgctcaggcgaatcgtccgcatgaagaagtcgtgcacttcctggcagaaggcgttgaaccctcccggcatcagcttgctgtccaagatccatccgggccacctcgcactctcgctgaaggcctacgacgactccatcgccgtcatacgagacaacgaaaagctgctccccttgacctcttccatgcaccaggaagaggaactgctgctgctcacgccactggtaaggccgctaccggcttcctccatgaccaaggcgttgctggagaagaaacaaatcgaccccgtaacactccacgacaaatgggtccaccgtgatcggggagccatcatgagcggcgagggagtatttcgcgagctcggaagatccctcgctcgtgcaaggcatgggaagctgctacatacatcttacaccgcgaacggtgtcaggccagtacacgaaaacctcatcaaccgagcctcgtgtatcatcatcgtgacggcggacgccaaccgcaacctgtaccaggcaggctttacaaagcacgtctccatgatgtgctcattgctgagggcaaatgggcagaagaagtcgctcatcgtggttgccgtcagctccccttacgacttcgcgatggacaagtcggtcgggacctacatctgcacctttgacttcaccgagacggctatggccgctctcgtacgggtcttatgcggcaagatcaagccccggggcacactgcccgggaccctcaggaagagcagaaaggtgctcaaatccaggcagcactggctcgtcgagccgtacgaccgcgaccgagacgccaaggggttacaggacctcctacaatccttggccagagcgagcgcgcctgcccaccagttcctgcagaccacgagcgcgcattcctttgagctgttcagccccaacatcgaggaagcccacttcgtagtgcgcaacagcagcactcaggcgctctacggcttctgcgcaacctactttgtccaagggacgggaattatcggcgctctctttgtcgaccccgccaagcgcaatgtctccatcggcaggtccctccaacggcgagccctgcgcggcttgacccagaagcgcggcatcaagaaggtacagctgggcatgtccttcccgggcgtcttcctaggcatccccgcggacgacagcgccgggctcaagcagtggtttaccaacgggggttgggacctgcagttcccacggcgcctcgtcaacatggccgtctcatctctcaacagctggattgcccccgaagggctgctgcagagcatccagcgcgccggcatcaccttcgacctcatccacggcctggacaatgccgacaacgtgctggcccacgtcagcgcacacgcaagcccggaggtgctggagctgtaccgcttcgcgctgcaagagaccaagagctgcggtgtcgtccgggccaagggccacgccgaggcgctgcttggcacggtaatcgtctgcaagcccgggagcaccctggccagcttcatcccgcccctgcagccctctccggcgcggcctgacgagcctgtcggggggatcgtgagcccgatcgtggcgccgtcgtcggctcaggcaaccttggtgctgcagggtctcgccctgatgggcctgcggcagaacaagacgcacaagtcgctaaaaagtgtgctgagctgggtgcaggatgacgcgcatgagccactgttggctatgggattcgaagtggtgcaggtctttgaggagtttacgaattcgccggataatacgctcttccggagcggcgatgagatggccggcttcagttccatgccggcgctgtcgtccggcgccgctccaggcccggactccatgtccatatcggcttcggagatggaggccttcgacgcctcgatggccttcgacgactccatgctgtcggtacacccgccatacctcttcgataacgacggccatgcgaaccacacctccccggccagcgaccccgtcaacgtgccccagatccccttcaccccgactgcctacgactttgagaacttcagcaccaccttcgaggaccccttctcctacccggctcggcccttcgacggcaccggccggagccactcgcgcgggccgcacgacgccgccgccgcacccaccgattcccaccgcagccaccacgacctctacggtcacatgggcataggcggcgcctcgccccaagacgatgacgacgaagggcccgacaacaagctgctcagcttcgggccccccattcccggaaaggccaccctcctcaccgacacgggccagttcgtcgagccggccatgacgggcgagctgtacggcatgttcttcgtcgccgaggacgtcttcggcgccgacagcaacgccaccggccgcccgctcgagctgacgtgctaccggcgcaacctctggcagatctccggccagatcacgctgccgcggcacgtggcgcagtacgtcgacgaccagggacggcgcggccccgtcgtcgagctggcggcctccatcacggcggtcgagagcatcgagggccgcgccgccgagatgatcacaatcccctggagggggagcaatgccccgctgggtgccgaggagtccaaggcagtgagcgcgccgcccgtggtcccgctcgactttagcggctccggccaggaggtggacggcgggagccgggtctcggtcccggtagcctggaagaggctgcagttcaagcacgcgacagcgaacaacggccggcgcaaggggctacaacagcactacgtggtgcagattaacctgctggtcaagagcaaggcgggggaatacatcaaggtagccgagatccagtcgggccccgtgatcgtgaggggaaggagcccgaggaactttgatagccgaaaggaggtcccgctgggggacaaacggccgctagagaggaggaacaccgaaggttcgggctctgccgcagcgaagcaggagaagcaggagaggcaggatgatggcacgccggtcaagacgcagcggtataacccgacgacgggcgtacagcaatcaccgtccgaccgggcgaccccctacggcatgaacacgcccaacccgcaacatccgaataagaagttggcggtgacctcgcccaacgttaaccgcccgcccgtaccctcttggggctcgctagagcccccttcctcggcaaacgcgaagcaaaacaacgccggcaacgcgaatccgaacgccgccgcggtcagacaacgcagcaacagcacaaccgggccccagcctctcccattatccctctccctatccgaggacgagcgcagcccgcccaaccgttccagctccaacgatagttcacagagccctcggctcaccactaaggcctctacgcggtcttccaccggtggtggggcgggcctggcgtccgccgggcaagccggcagcagcagcggggcgcacgaccatcttgggggttcgcttgactccgatgacatgttatacgagtactttcccctcagcctggacgactggatgccacccgtcgacgccatctaccgtccgcacgtcgtccaccacacaatcgtcccgccagaagtcaaggcgcagcaggtgcggagcaaagcaaagcggtactttgccgccgagtga

SEQ ID NO: 310 - protein, 1543 aa, Myceliophthora thermophilia
MSTLDGDLDPLWQDLDWAIGQMLIMGWDGTEVTPQIRTLIEQHHLGSVLLTAKNLKCSAEQTARLVQELQTIARQAGHPYPLLIALDQENGGVNSLFDEDYICQFPSSMGQAAASSADLAYKIAKATATEVSAVGVNLILGPVLDVLTNARYQPLGVRATGDDPQEVSQYGIAAMNGYKDAGVATCGKHFPSYGNLDFLGSSLDIPIITQTLEELSLSALVPFRNAIATGKLDAMFVGGCGIANPSMNVNHACLSEQVVDDLLRNELGFQGVAISECLEMEGLRNEIGVKTGTVMAVEAGCDLVMLCRAYDVQLEAISGLKLGVENELITKERIYTSLRRIVRMKKSCTSWQKALNPPGISLLSKIHPGHLALSLKAYDDSIAVIRDNEKLLPLTSSMHQEEELLLLTPLVRPLPASSMTKALLEKKQIDPVTLHDKWVHRDRGAIMSGEGVFRELGRSLARARHGKLLHTSYTANGVRPVHENLINRASCIIIVTADANRNLYQAGFTKHVSMMCSLLRANGQKKSLIVVAVSSPYDFAMDKSVGTYICTFDFTETAMAALVRVLCGKIKPRGTLPGTLRKSRKVLKSRQHWLVEPYDRDRDAKGLQDLLQSLARASAPAHQFLQTTSAHSFELFSPNIEEAHFVVRNSSTQALYGFCATYFVQGTGIIGALFVDPAKRNVSIGRSLQRRALRGLTQKRGIKKVQLGMSFPGVFLGIPADDSAGLKQWFTNGGWDLQFPRRLVNMAVSSLNSWIAPEGLLQSIQRAGITFDLIHGLDNADNVLAHVSAHASPEVLELYRFALQETKSCGVVRAKGHAEALLGTVIVCKPGSTLASFIPPLQPSPARPDEPVGGIVSPIVAPSSAQATLVLQGLALMGLRQNKTHKSLKSVLSWVQDDAHEPLLAMGFEVVQVFEEFTNSPDNTLFRSGDEMAGFSSMPALSSGAAPGPDSMSISASEMEAFDASMAFDDSMLSVHPPYLFDNDGHANHTSPASDPVNVPQIPFTPTAYDFENFSTTFEDPFSYPARPFDGTGRSHSRGPHDAAAAPTDSHRSHHDLYGHMGIGGASPQDDDDEGPDNKLLSFGPPIPGKATLLTDTGQFVEPAMTGELYGMFFVAEDVFGADSNATGRPLELTCYRRNLWQISGQITLPRHVAQYVDDQGRRGPVVELAASITAVESIEGRAAEMITIPWRGSNAPLGAEESKAVSAPPVVPLDFSGSGQEVDGGSRVSVPVAWKRLQFKHATANNGRRKGLQQHYVVQINLLVKSKAGEYIKVAEIQSGPVIVRGRSPRNFDSRKEVPLGDKRPLERRNTEGSGSAAAKQEKQERQDDGTPVKTQRYNPTTGVQQSPSDRATPYGMNTPNPQHPNKKLAVTSPNVNRPPVPSWGSLEPPSSANAKQNNAGNANPNAAAVRQRSNSTTGPQPLPLSLSLSEDERSPPNRSSSNDSSQSPRLTTKASTRSSTGGGAGLASAGQAGSSSGAHDHLGGSLDSDDMLYEYFPLSLDDWMPPVDAIYRPHVVHHTIVPPEVKAQQVRSKAKRYFAAE

SEQ ID NO: 311 - DNA, 2334 bp, Myceliophthora thermophilia
  CDS (1)...(2334)
atgaggttcctcccctcgacgttgcttcttgcggcggccgccctggctgccgacaaggggcgcccgagtctcaagaatgctgtgtacaagaaccccaaagcctcggtcgaggaccgtgtagccgaccttctctcccgaatgaccatcgaggagaaggcatcccagcttctccaaggtgacatccgcaactggatgaacgagacgaccaatgcgctcaaccagaccggtctggaatggagcaccagataccgggggagcgccttttatgtaggcgtccccgttcccaatgagtggctcacaaagcacatcaaggccgcccaggattacatccagaaggagacctacctgggtatcccggcctttgttcagaccgagggtcttcacggttttcttgctcacaatgccaccatcttcagctcgcccataggactcggctgctcatggaacccgtccctggttgaggagatggcggctgccattgccaaagaggcgcgcgcccttggcgtcaaccagctctttgccccggtcgccgacctcgcgcgggaactccgccacggccgtgtcgaggagatgtacagcgaggacggcctcctcgccggcgagttcgcccgtgcctatgtcaagggcgcgcagtcggccggtgtcagtgccatggtcaagcactttgccgcctttggcgtgacggagcagggcttgaacacggggcccgtccacggcggcgaacgagagctgcgcacaacctatctgccgccctaccagcgcgccatcatcgacggaggggtctattccatcatgacggcctaccacagctacgacggcatccccgccgtgtccgacccccacctgctcaccgacatcctccgggacgaatggggttacggatacttcaccatgacagacgccggcgcctcggaccgcctctgcgccgacttcaagatgtgcgcctcggatcccatcgacaaggaagccatcgtcaagtacatcctcccggccggcggcgacgtggagatgggaggcgggtcgtactcgttcgagaagatccccgagctggtgtccagcggcaaggtcgaggaggagctcgtcgataccgccgtcgcccgcgtccttcgggccaagtttgagctcggcctcttcgagaaccccttcccgggcctcccgtccgaggaggcgaacaaggtgatccacgcgcccgagcacgtcgccctggcgaagaagctggacgaggagtccatcgtcctcctggagaaccacaacaacgtcctgccgctgagcaaggatgcgtccgtggccgtcatcggacccatggcgcacggattcatgaactacggcgactacgtcgtcgtcaactcttcgacccgcgggatcacgcccctcgacggcatcaaggcggccagccggggcaaggtcacgtacgcgaaaggctgcgagcgctggtccaactcgcaagacgggtttcccgaggccgtcgcggccgccgaggccgccgacgtcgccgtcgtcgtggtcggcacctggtctcgggaccagaacgagctctggcagggcctgaacgccaccacgggcgagcacgtcgacgtggacagcctcgacctggttggcgcccaggaggccctcgtccgcgccatcgtcgagacgggcaagccgaccgtggtcgtcttctcgtccggcaagcccgtcaccgcgccgtcgatctcggagcacgccgccgccctcgtccagcagttctacccctcggagcagggaggcgccgccctcgcctccatcctcttcggcgacgtgaacccgagcggcaggctcagcgtcagcttcccccgcagcgtcggcgacctgccggtctactacgactacttgaactcgggacgcggcgcctcgcctgatgcgggcgtcgcttacgagaacggcactctggtgtttgggcatcagtacgtcctgggtgacccgaggcctctgtacgagttcggttacgggctgagttactccaagttcgagtacggcgacgtcactgtcgacaagacgatcgtgacggcccaagacaccgtcaccgtcaccgtcaccgtcaagaacgtgtcgagtcgggaaggtcaggaggtcgtccaggtctacgtcaaggacctgatcgccagcgtcgtcgttcccaacattcggctgaggggattccagaagctgaagctgaggccgggagagagcaagcgagtgagcatcaaggtcaacgtacaggacctgggcgtctgggacgcgaggatgcgatacgttgttgagcccggcgactttctgttcctcgttggtgcgtcgagcaacgatttcaggggaaatgtcactgttactgtcaagtag

SEQ ID NO: 312 - protein, 777 aa, Myceliophthora thermophilia
MRFLPSTLLLAAAALAADKGRPSLKNAVYKNPKASVEDRVADLLSRMTIEEKASQLLQGDIRNWMNETTNALNQTGLEWSTRYRGSAFYVGVPVPNEWLTKHIKAAQDYIQKETYLGIPAFVQTEGLHGFLAHNATIFSSPIGLGCSWNPSLVEEMAAAIAKEARALGVNQLFAPVADLARELRHGRVEEMYSEDGLLAGEFARAYVKGAQSAGVSAMVKHFAAFGVTEQGLNTGPVHGGERELRTTYLPPYQRAIIDGGVYSIMTAYHSYDGIPAVSDPHLLTDILRDEWGYGYFTMTDAGASDRLCADFKMCASDPIDKEAIVKYILPAGGDVEMGGGSYSFEKIPELVSSGKVEEELVDTAVARVLRAKFELGLFENPFPGLPSEEANKVIHAPEHVALAKKLDEESIVLLENHNNVLPLSKDASVAVIGPMAHGFMNYGDYVVVNSSTRGITPLDGIKAASRGKVTYAKGCERWSNSQDGFPEAVAAAEAADVAVVVVGTWSRDQNELWQGLNATTGEHVDVDSLDLVGAQEALVRAIVETGKPTVVVFSSGKPVTAPSISEHAAALVQQFYPSEQGGAALASILFGDVNPSGRLSVSFPRSVGDLPVYYDYLNSGRGASPDAGVAYENGTLVFGHQYVLGDPRPLYEFGYGLSYSKFEYGDVTVDKTIVTAQDTVTVTVTVKNVSSREGQEVVQVYVKDLIASVVVPNIRLRGFQKLKLRPGESKRVSIKVNVQDLGVWDARMRYVVEPGDFLFLVGASSNDFRGNVTVTVK

SEQ ID NO: 313 - DNA, 2673 bp, Myceliophthora thermophilia
  CDS (1)...(2673)
atggtttaccgcgcgagcgccgtttggctctcgctggttctcagcctctctgctcccccaacgctcgcccgtaccattgggccgagagacaaggtcccagaaggattctatgcggctccctactaccccacgccgcacggcgggtggcttgattcgtggaaggatgcgccatgtgtgggaaacacgggaagcgccgaccgcctgagcttcccccagctctgccttcaagactcggcgcttggggtggcatccgccgacaacgtcaccgctttcccacccggcatcaccaccggggcgacgtgggataaggccctgatgtacgcccgcggagttgctattggcagggagttccgcggcaagggggccaacgtccatctcggcccctccgttggccccattggacggaagccactcggcggccggaactgggaagggttcggcgccgacccggtgctgcaggccaaggcggccgccttgcacattaagggcgtccaggagcagggtgttatcgcgaccgtcaagcatctgatcgggaacgagcaggagatgttccgcatgtacaacccgttccagcccgggtacagcgccaacattgacgaccggacgctccatgagttgtacctgtggccgttcgccgaggccgtccacgccggcgtcggcgcggtcatgaccgcctacaatgccgtgaacgggtccgcctcgtcgcagaatagctacctgatcaacggcctcctcaaggacgagctcggcttccagggcatggtcatgtcagactggctcagtcacatctcgggcgtcggctcggctctggccggtctcgacctcaacatgccgggcgacaccaacgtcccgctctttggcttcagcctgtggcagtacgagctgaccaggtccgtcctgaacggctccgtgcccctagataggctgaatgacatggctacccgggtggtggcggcctggtataagatgaggcaggacaaggatttcccacggcccaacttctcgtccaacacgcgggaccggaacgggctcctgtacccggccgccatcttctctcccatcggccaggtcaactggttcgttaacgtccaggaggaccactacaagatcgctcgccaggtcgcccaggatgccattacgctcctcaagaacgacggcagccttctgccgctgacgggctcgggaaagatcaccgtcttcgggaccggcgcgcaggtcaaccccgcggggccgaacgcctgtctgaacagggcgtgcaacaagggcaccctcggcatgggctggggctcgggcgtggccgactacccctacttcgacgaccccatcacggccatcaggaagagggtcccggacgtcgagttccacaacagcgacgagttcccgctcttcttcacgggcgaggcgccggcccccgacgacgtcgccgtcgtcttcatcagctcggacgcgggcgagaacagcttcacggtcgagaacaaccacggcgaccgcgacgcggacaagctggcagcctggcacggcggtgacgggctggtcaagaaggtggccgacaagttcccgaacgtggtcgtcgtcgcccacacggtggggccgctcatcctcgagccctggatcgaccacccttccgtcaaggccgtcctcttcgcccacctcccgggccaggaggcgggcgagtcgctggccggcgtcctcttcggcgacgtgtcgccgagcggtcacctcccctactccatcacccgggccgagaccgactaccccgacagcatcgccaagctcaaggggttcaccctcggccaggtccaagacacgtactcggaggggctctacatcgactaccgctggctcaacaagcgctccatcaagccgcgtttcgccttcggccacggcctcagctacaccaccttcgccttcaccaacgccaccattcgcgccgtcaccgcccccctggaccccatcccgccgccgcggccctccaagctgccgaccccgtcctacccgaccgacctgcccgccgcctcggaggcctactacccggacgggttcaagcccatctggcgctatctctactcgtggctgccgaagtccgaggcggacgccgcgtgggccatcggcgccaccggcaagcagaagtacgcttacccggacgggtactcaaccacgcagaagcccgggccggcggcgggcgggggcgagggcggccacccggcgctgtgggacgtggcgtgggaggtcgacgtgacggtgaccaacgcggccggcagcggcgccaacatcagctccgcggcggagaagaagacgacgggtggtgtcggcggccccggcgggctgccccggttcttccccggcccggcgcgggcctcggtgcaggcgtacgtgcagtacccgccgggcatcccgtacgacacgccgccggtgcagctgcgcgactttgagaagacgccccccctggcgcccggcgagagccagacggtcacgctgcggctgacgcgcaaggacgtcagcgtctgggacgtcgagctgcagaactgggtcgtccccggggcgacgctcgggggaggagggaaaggcccgggcaggtacaccatctggatcggcgaggccagtgatcagctgttcctggcctgttatacggataccggcaagtgcgagcaggggctggagccgcccgtctga

SEQ ID NO: 314 - protein, 890 aa, Myceliophthora thermophilia
MVYRASAVWLSLVLSLSAPPTLARTIGPRDKVPEGFYAAPYYPTPHGGWLDSWKDAPCVGNTGSADRLSFPQLCLQDSALGVASADNVTAFPPGITTGATWDKALMYARGVAIGREFRGKGANVHLGPSVGPIGRKPLGGRNWEGFGADPVLQAKAAALHIKGVQEQGVIATVKHLIGNEQEMFRMYNPFQPGYSANIDDRTLHELYLWPFAEAVHAGVGAVMTAYNAVNGSASSQNSYLINGLLKDELGFQGMVMSDWLSHISGVGSALAGLDLNMPGDTNVPLFGFSLWQYELTRSVLNGSVPLDRLNDMATRVVAAWYKMRQDKDFPRPNFSSNTRDRNGLLYPAAIFSPIGQVNWFVNVQEDHYKIARQVAQDAITLLKNDGSLLPLTGSGKITVFGTGAQVNPAGPNACLNRACNKGTLGMGWGSGVADYPYFDDPITAIRKRVPDVEFHNSDEFPLFFTGEAPAPDDVAVVFISSDAGENSFTVENNHGDRDADKLAAWHGGDGLVKKVADKFPNVVVVAHTVGPLILEPWIDHPSVKAVLFAHLPGQEAGESLAGVLFGDVSPSGHLPYSITRAETDYPDSIAKLKGFTLGQVQDTYSEGLYIDYRWLNKRSIKPRFAFGHGLSYTTFAFTNATIRAVTAPLDPIPPPRPSKLPTPSYPTDLPAASEAYYPDGFKPIWRYLYSWLPKSEADAAWAIGATGKQKYAYPDGYSTTQKPGPAAGGGEGGHPALWDVAWEVDVTVTNAAGSGANISSAAEKKTTGGVGGPGGLPRFFPGPARASVQAYVQYPPGIPYDTPPVQLRDFEKTPPLAPGESQTVTLRLTRKDVSVWDVELQNWVVPGATLGGGGKGPGRYTIWIGEASDQLFLACYTDTGKCEQGLEPPV

SEQ ID NO: 315 - DNA, 312 bp, Myceliophthora thermophilia
  CDS (1)...(312)
atgccgaacaagccggacccgtcctgggccgccgcctacgccaaagccatcgactttctctccagcctcaccctgacggagaaggtcagcctcacgacgggcacgacgggatggcaggcggatcgttgtatcggcaacatggggggcgtgccccgcctgggattctcgagactcaggggcgaggcgatcggagccgagttcaggggtaagggaatcgatgtgatgctcgggccggtgtcgggccctctgggcaggtcgccgcagggaggaagccccgacccctatcttgctggtgtcgccatggccgagtga

SEQ ID NO: 316 - protein, 103 aa, Myceliophthora thermophilia
MPNKPDPSWAAAYAKAIDFLSSLTLTEKVSLTTGTTGWQADRCIGNMGGVPRLGFSRLRGEAIGAEFRGKGIDVMLGPVSGPLGRSPQGGSPDPYLAGVAMAE

SEQ ID NO: 317 - DNA, 2907 bp, Myceliophthora thermophilia
  CDS (1)...(2907)
atggctcgcgacgggagccatcaagggctcctccgcgattctaagcggtcgccccaacgccccaaggacgacgccggccatgattccgactccgacattgaagcgatcgagtatcttgaccgcaacgcacctcgatcacccaagtccgactacggcccgtcgtttcccgcggcaaacaaagcacgtcaatcgtggatcctccgttgcctggggcggcggagccggtgttgcatcggttttttggctggcttcatcgggctgtggatcttgctaagcgcgggaggtgccttcgtctacaagaaatatcaggaagagcctccctatggccagtcgcccccgtggtacccggcccctaagggcggcattgccaagacgtgggccgagagttatgagaaggcggccaagatggtgagcaagatgacgctggcggaaaaggtcaatgtcacgaccgggacagggtggcagatgggccttgcggttggcaccaacggtccggccgtccacgtgggcttcccgcaactgcagttgcaggacgggccgttgggcatcaggttcgccgataacatcaccgcctttcccgcaagcatcacggtaggcgcaacctggaatcgccagttgatgtacgcgcgtggccgtgctcacggcatcgaagcgcgccaaaagggcattaacgtccttctgggcccctgcgtgggccccctcggccgtatgcccgccggcgggcgcaactgggaaggattcggggccgatccgtacctgcagggcgtggcgggtgccgagacggtcaagggcatccagagcgagggcgtcatggccacaattaagcacttcgtcggaaacgagcaggagcacttccgccagccgtgggagtggggcctgccccatgccctcagtgccaacatcgacgaccgtaccctgcacgagctgtatgtttggcccttcgccgacgcagtcaaagccggcgtcgcctccgtcatgtgctcctacaacatggtcaacaactcgtacgcctgcggcaacagcaagttgctcaatggcatcctcaaggacgagatgggcttccagggtttcgtcatgagcgactggcttgcccagcgctccggggtggcctcggccctggcgggtctggacatgaccatgcccggcgatggcgcgaagtgggccagcggagagtcgttttggggacccgagctgagcagggcggtcctgaacggcagcgtccccgtcgatcgcctgaacgacatggtcacccgaatcgttgcggcctggtaccagctggggcaggacgacgagaccaagttcccgcgccagccgcccaacttctcgtcctggaccgatgaccgcaccggcgtcctggcgcccgggagcccgagcccgcaggagaaggtcgtggtcaaccagttcgtggacgtgaaggcgaaccactccgtcatcgcccgcgaagtggccgtccagggcacggtgctgctcaagaatgagggattgctgcctattagccgcactggcctagacgaggcggaactcgaggcgagacgtggcgctgctgcgagagcgacaggaagaagacgcaccggaaagttcagcgttggcgtgtttggggacgacgctgggcccgggaaaggacccaactactgcaaggatcgtgcttgtaaccaaggcacgctggcttcgggctggggttccggggccgtcgagttcccttatttagtatcgcccattgatgcgctccgcaaggagttcgacagctccaaagtcgagctgcacgagcatctgacagataagccatccttcgccggcaaggacgcggcggtccttgaagacctggaactctgcatcgtcttcgtgaacgccgacgcgggcgagggattcgtccggtgggaggacgtcaagggagatcggccgaacctaaacctccagaaaggcggcgacgacctcattgtcaacgtagcatccaagtgcggttctggctccggcgacgtcattgttgtcgtccatgcggtagggccggtgctgatggagaagtggatcgagctgcccaacatcaaagctgttctcttcgccaacctccccggccaagaatctggaaatgcgcttgccgacgtcctcttcggcaaggccaatccgtcaggccatctgcccttcaccattggcaaatccccggaggattacggtcctggcggcaaggtcatgtacctgccaaacggcgtcgttccccagcaggatttctcggagggtctgtacgtggactaccgctactttgacaagaaggatatcgagccccggttcgagttcggcttcggcctcagttacaccaccttcaacctgagcaaccttcgcgtcacgtcgcacaagaacaagtcggccctgccggcagcccggccgagccccgccgcgcaaccaccaagctacccgaccgccatcccgcccaaggacgaagccatgttccccccggggttccgcgcgctggagaagtatatttacccgtatctcgagtcggtggatgacatcgaggtcggagactacccgtatcccgacggctacgacacggagcagcccctgagcggcgccgggggcgatgagggcggcaaccctgacttgtgggcgacctacgtgactgtctcggcggacgtcaagaacgatggccccgtggccggcgccgtggtgccgcagctatatctagagtatcccgccaaggagggggtggatttccccgtccgggtgctccggggattcgaaaagttctatctcgaaccgggcgagacgcacgccgctcgttttaacctgacgaggagggatctgagttactgggatgtcgtggagcagaattgggtcatggtcacggagggagagtacaagtttcgggtcggcttcagttcgagggatttgcctttgacgggcacctggtga

SEQ ID NO: 318 - protein, 968 aa, Myceliophthora thermophilia
MARDGSHQGLLRDSKRSPQRPKDDAGHDSDSDIEAIEYLDRNAPRSPKSDYGPSFPAANKARQSWILRCLGRRSRCCIGFLAGFIGLWILLSAGGAFVYKKYQEEPPYGQSPPWYPAPKGGIAKTWAESYEKAAKMVSKMTLAEKVNVTTGTGWQMGLAVGTNGPAVHVGFPQLQLQDGPLGIRFADNITAFPASITVGATWNRQLMYARGRAHGIEARQKGINVLLGPCVGPLGRMPAGGRNWEGFGADPYLQGVAGAETVKGIQSEGVMATIKHFVGNEQEHFRQPWEWGLPHALSANIDDRTLHELYVWPFADAVKAGVASVMCSYNMVNNSYACGNSKLLNGILKDEMGFQGFVMSDWLAQRSGVASALAGLDMTMPGDGAKWASGESFWGPELSRAVLNGSVPVDRLNDMVTRIVAAWYQLGQDDETKFPRQPPNFSSWTDDRTGVLAPGSPSPQEKVVVNQFVDVKANHSVIAREVAVQGTVLLKNEGLLPISRTGLDEAELEARRGAAARATGRRRTGKFSVGVFGDDAGPGKGPNYCKDRACNQGTLASGWGSGAVEFPYLVSPIDALRKEFDSSKVELHEHLTDKPSFAGKDAAVLEDLELCIVFVNADAGEGFVRWEDVKGDRPNLNLQKGGDDLIVNVASKCGSGSGDVIVVVHAVGPVLMEKWIELPNIKAVLFANLPGQESGNALADVLFGKANPSGHLPFTIGKSPEDYGPGGKVMYLPNGVVPQQDFSEGLYVDYRYFDKKDIEPRFEFGFGLSYTTFNLSNLRVTSHKNKSALPAARPSPAAQPPSYPTAIPPKDEAMFPPGFRALEKYIYPYLESVDDIEVGDYPYPDGYDTEQPLSGAGGDEGGNPDLWATYVTVSADVKNDGPVAGAVVPQLYLEYPAKEGVDFPVRVLRGFEKFYLEPGETHAARFNLTRRDLSYWDVVEQNWVMVTEGEYKFRVGFSSRDLPLTGTW

SEQ ID NO: 319 - DNA, 2484 bp, Myceliophthora thermophilia
  CDS (1)...(2484)
atgtcgacgaccaacccccgcttcccgtttctccgcacgaagcgcggcatcgccctcgtcgtcgccgccgtcctgctcatcgttggcggcggtctgtccgggctggccgcgctgcgcacccgcagcagcggggacggggactctgcgtcggcaggcgaggatggggagggggtgatcaaggatgactcgtggttctacggactgtcgccacctgtgtatccctcgccgaatattacgggtggtgaaggcaagtgggtagaggcgacgaggaaagccagggagttggtgcggaggatgacgcttgaggagaaggtcagcttgactgccggcgatggcacatttcccggctgttccggctctctcccggccattccacgcctcaaattcccgggcatgtgtctgagcgatgcgggaaatgggctccgcggcaccgatttcgtcagtacctggccgagcggtatccacgttggtgccagctggaacaaggctctcgcccgccggcggggttctggaatgggagccgagttcaagaccaagggtgtcaatgtgatgctggggcctgtcgtcgggccagctggtcgagtggtgctgggcggtaggaactgggaaggcttctcaagcgacccctatttatcgggagttttggtatccgagactgtcacggcggtccaagcagccggcgtcatcaccagcaccaagcactatattgccaatgagcaagagacgaaccgaaacccctccggcgacatccagtcggtgtcatcaaacatagatgataggaccatgcacgagttctatctatggccttttcaagacgctatccgcgccggcagctgcaacataatgtgctcgtaccaacgcctcaacaactcgtacggctgcgcaaacagcaaggcgctcaacgggttactcaagaccgagctcggctttcagggctgggtcgtaagcgactggggcgcccagcatgccggggtcgccgcggcactggcaggcatggatgttgccatgccgaatggcgatgctctctggggtccgcatctggtcgacgccgtcaacaatggttcggtttccgaaactcgcgtagacgacatggtcgtcaggacgctcgcgacatggtacctgttgggccaggatcgggacttcccacggcccggtatcggtatgcccacggatctcacgaggaatcacgggattgtcgacgcgaggaactccagtttccggtcaacactgttcgacggtgccgtcgagggtcacgttctggtcaagaacacccgaaacgccctgccgctgagagaaccaaagatgctgtctgttttcggttactcggccaagaacccggaccacaacaatccctcacccggccaatcgccctggctctggggctccgagtccttcaactacaccgagttcggcggccgcttctttggtctccccggcgagtatggctccacgcccatcgccttcaacggcaccatctactcgggtggcgggtccggggccacgtcgccggccgccatggtctccccctttgacgcgctggtccagcgggcatacgacgacggcacggccctcttctgggactttgtcagcggagagcccttcgtcaatcccgcgtcggacgcctgcctggttttcggcaacgcttatgccaccgaggccgccgaccgacccggggcgcgcgacgactacaccgacggcctgatcaggcacgtcgcagaccgctgcgccaacacgatcgtcgtcatccacaatgcggggatccgcctggtcgaccagttcatcgaccaccccaacgtgacggccctcctgttcgcgcacctgcccggggaggcatccgggcgcgcgctggtgtcgctgctgtacggggacgagaacccgtcgggcaagctgccgtatacggtggcgcgcaacgagtcggactatcccgtgctgggcccggacgtggcggccgaggggagcatgttcgcgcggttcccgcagagcaacttcaccgagggcgtgttcctggactatcggcactttgacgcgcggaacatcacgccgcggtacgagttcgggttcgggctgagctataccacgtttgcctacgacaacctggtggtggaaaaggtggcctccgcaggacggctcggcgagtatccgacgggacgggtcgtcgagggcggccaggaggacctgtgggatgtgctggtggaggtgtcggccgaggtgaccaacaccgggaaggtggccggcgccgaggttgcgcagctgtacgtggggatccccgcggagggggcgccggtgaggcagctgaggggcttcgagaagccgttcctgaacgcgtcggcgaccgcgaccgtccggttcccgttgacgaggagggacctgagcgtgtgggatgtggtggcgcagaagtggcggcttgtcaggggtcgtgagtataagatcgaggtgggcggcagcagcagggacttgccgctcgttgggacggttacgatctga

SEQ ID NO: 320 - protein, 827 aa, Myceliophthora thermophilia
MSTTNPRFPFLRTKRGIALVVAAVLLIVGGGLSGLAALRTRSSGDGDSASAGEDGEGVIKDDSWFYGLSPPVYPSPNITGGEGKWVEATRKARELVRRMTLEEKVSLTAGDGTFPGCSGSLPAIPRLKFPGMCLSDAGNGLRGTDFVSTWPSGIHVGASWNKALARRRGSGMGAEFKTKGVNVMLGPVVGPAGRVVLGGRNWEGFSSDPYLSGVLVSETVTAVQAAGVITSTKHYIANEQETNRNPSGDIQSVSSNIDDRTMHEFYLWPFQDAIRAGSCNIMCSYQRLNNSYGCANSKALNGLLKTELGFQGWVVSDWGAQHAGVAAALAGMDVAMPNGDALWGPHLVDAVNNGSVSETRVDDMVVRTLATWYLLGQDRDFPRPGIGMPTDLTRNHGIVDARNSSFRSTLFDGAVEGHVLVKNTRNALPLREPKMLSVFGYSAKNPDHNNPSPGQSPWLWGSESFNYTEFGGRFFGLPGEYGSTPIAFNGTIYSGGGSGATSPAAMVSPFDALVQRAYDDGTALFWDFVSGEPFVNPASDACLVFGNAYATEAADRPGARDDYTDGLIRHVADRCANTIVVIHNAGIRLVDQFIDHPNVTALLFAHLPGEASGRALVSLLYGDENPSGKLPYTVARNESDYPVLGPDVAAEGSMFARFPQSNFTEGVFLDYRHFDARNITPRYEFGFGLSYTTFAYDNLVVEKVASAGRLGEYPTGRVVEGGQEDLWDVLVEVSAEVTNTGKVAGAEVAQLYVGIPAEGAPVRQLRGFEKPFLNASATATVRFPLTRRDLSVWDVVAQKWRLVRGREYKIEVGGSSRDLPLVGTVTI

SEQ ID NO: 321 - DNA, 1029 bp, Myceliophthora thermophilia
  CDS (1)...(1029)
atgaagttcctcgacgtccttctcggtgccgcagctgccagctcggccctggcagcgccgacttgcacaaccaagacaaagcgcgcgggcaagttcaagtttgtcggcgtcaaccagtcctgcgccgagtttggccaggacacgctcccgggccagctcaacaagcactacacctggccggccaagtcgagcattgatgctttcgaaaatcagacactcctcgccaccggaatgaacaccattcgcatcccgtttatgatggagcgtcttatccccaaccaactgacgggaaccgtcaacgaaacgtactccgcggggcttatcgataccgtttcctacgtcacgagcaagggagcctatgctgtcattgacccccataacttcggccggtactacacgcaagtcatcaccgacgtcgaaggcttcaaggcctggtggacgaccacggccgggctgtttgccgacaacgacaaggtcatcttcgacaccaacaacgagtaccacgacatggaccaatcgctcgttgtcaatctgaaccaggccgccatcgacggcatccgggccgccggcgccacctcgcagtacatctttatcgagggcaactcgtggacgggcgcatggacctgggtctcctcgggcaacggcgagtccctgctgaacctgtcggacccggagggcgacgacaagctcatctacgagatgcaccagtacctggacgaggacgggtcgggcacgcacgagcagtgcgtctcgggcaccatcggccgggagcgcctccaggcggcgaccgagtggctcaaggccaacggcaagaaggccatcctgggcgagacggccggcggcgccaacgaccagtgcatctcggccctgaccggcatgctctccttcatggaggagaactcggacgtctggcagggctggctctggtgggctgccggtccctggtgggccgactacatgtactcgattgagccgccgagcggtaccgcgtacaccaaggttttgcccagcctccagccttatatctga

SEQ ID NO: 322 - protein, 342 aa, Myceliophthora thermophilia
MKFLDVLLGAAAASSALAAPTCTTKTKRAGKFKFVGVNQSCAEFGQDTLPGQLNKHYTWPAKSSIDAFENQTLLATGMNTIRIPFMMERLIPNQLTGTVNETYSAGLIDTVSYVTSKGAYAVIDPHNFGRYYTQVITDVEGFKAWWTTTAGLFADNDKVIFDTNNEYHDMDQSLVVNLNQAAIDGIRAAGATSQYIFIEGNSWTGAWTWVSSGNGESLLNLSDPEGDDKLIYEMHQYLDEDGSGTHEQCVSGTIGRERLQAATEWLKANGKKAILGETAGGANDQCISALTGMLSFMEENSDVWQGWLWWAAGPWWADYMYSIEPPSGTAYTKVLPSLQPYI

SEQ ID NO: 323 - DNA, 1113 bp, Myceliophthora thermophilia
  CDS (1)...(1113)
atgaaggccatcttcgccctcggcacctgcctgctttccgcggcccaatgccttccttcagcacgcgcgacggcctcgtccggcgccgaggggactcgcttctccatcgacggcaagacggggtacttcgcaggcaccaactcgtactggatcggcttcctgaccaacaacaaggaccttgacaccaccttggatcacatcgcctcctccggcctcaagatcctgcgtgtgtggggcttcaacgacgtcaacagcaggccgagtcccggcaccgtctggttccagctcctctcgtcctcgggttctgagatcaacatgggtcccgacggcctgcagcggctcgactatgtggtccagtcggcagagaagcgcggcgtcaagctgatcatcaacttcgtcaacaactgggatgactacggcggcatgaacgcctatgtcaaggcttttggcggcaccaaggagggctggtacaccaatgcccgggcccaagcgcagtacaagaagtacatacaggcggtggttagccgttacgacatgtccgacgccgtctttgcgtgggagttcgccaacgagccccggtgcaaggggtgcagcacggacgtcatctacaagtgggcgacggatatctcggcgtacatccgcagcctcgatccgagccacatgatcacgctgggcgacgagggtttcgggcttcccggagacggaacatacccctaccagtacagcgagggtgtggactttgtcaagaatttgaagatcaaggacttggatttcgggaccttccacatgtaccccgacagctggggcgttccgtactccttcgccaacggctggatcaagagtcatgcggacgcgtgcaaagccgcgaacaagccatgtcttctggaagagtacggcgcctacgctagctgcgatatccagaaaccctggcagcagacagctctttcgttcgctgccgacggtgtgagcggcgacctgttttggcggtggggcgaccagctcagttacggcctgtcgccaaacgacggcaacacggtctattacggttcatcacttgctcaatgcctcgtgacggatcatgttaaggctattaatggctcaggtgccgtttga

SEQ ID NO: 324 - protein, 370 aa, Myceliophthora thermophilia
MKAIFALGTCLLSAAQCLPSARATASSGAEGTRFSIDGKTGYFAGTNSYWIGFLTNNKDLDTTLDHIASSGLKILRVWGFNDVNSRPSPGTVWFQLLSSSGSEINMGPDGLQRLDYVVQSAEKRGVKLIINFVNNWDDYGGMNAYVKAFGGTKEGWYTNARAQAQYKKYIQAVVSRYDMSDAVFAWEFANEPRCKGCSTDVIYKWATDISAYIRSLDPSHMITLGDEGFGLPGDGTYPYQYSEGVDFVKNLKIKDLDFGTFHMYPDSWGVPYSFANGWIKSHADACKAANKPCLLEEYGAYASCDIQKPWQQTALSFAADGVSGDLFWRWGDQLSYGLSPNDGNTVYYGSSLAQCLVTDHVKAINGSGAV

SEQ ID NO: 325 - DNA, 348 bp, Myceliophthora thermophilia
  CDS (1)...(348)
atgctgaacctatcccacaccgagcacactctctttcgccctctccccctttccctccctcatcaccaccaccaccaccacttcattgtcggccgccgcccgcccgaggcgctgcgcggcgccatcacgcgccacatccgcgccgtcgccggctactaccgcggccgctgctacgcctgggacgtggtcaacgaggcgctcgacgaggacggcacctaccgcaagagcctcttctacaacgtcctcggcgacgagtacatccgcatcgtcaagaccttcgagaagctgatccgcgagaagccaaagccgggcttcaagcgcaagaggaaaaccgtagcagcaaactaa

SEQ ID NO: 326 - protein, 115 aa, Myceliophthora thermophilia
MLNLSHTEHTLFRPLPLSLPHHHHHHHFIVGRRPPEALRGAITRHIRAVAGYYRGRCYAWDVVNEALDEDGTYRKSLFYNVLGDEYIRIVKTFEKLIREKPKPGFKRKRKTVAAN

SEQ ID NO: 327 - DNA, 195 bp, Myceliophthora thermophilia
  CDS (1)...(195)
atggcaagagggcacaccatcgagctcagcatgatcaggaggattgaattccaccaaacttccaacttcagaacgcgcaacctgctgatcgagtactacatcgtcgagtcgcatggggagctggcgcccaacgagccgtggacggccaggcactttgaccagtggaccacccttggcatgccccagggtacctaa

SEQ ID NO: 328 - protein, 64 aa, Myceliophthora thermophilia
MARGHTIELSMIRRIEFHQTSNFRTRNLLIEYYIVESHGELAPNEPWTARHFDQWTTLGMPQGT

SEQ ID NO: 329 - DNA, 657 bp, Myceliophthora thermophilia
  CDS (1)...(657)
atggtctcgttcactctcctcctcacggtcatcgccgctgcggtgacgacggccagccctctcgaggtggtcaagcgcggcatccagccgggcacgggcacccacgaggggtacttctactcgttctggaccgacggccgtggctcggtcgacttcaaccccgggccccgcggctcgtacagcgtcacctggaacaacgtcaacaactgggttggcggcaagggctggaacccgggcccgccgcgcaagattgcgtacaacggcacctggaacaactacaacgtgaacagctacctcgccctgtacggctggactcgcaacccgctggtcgagtattacatcgtggaggcatacggcacgtacaacccctcgtcgggcacggcgcggctgggcaccatcgaggacgacggcggcgtgtacgacatctacaagacgacgcggtacaaccagccgtccatcgaggggacctccaccttcgaccagtactggtccgtccgccgccagaagcgcgtcggcggcactatcgacacgggcaagcactttgacgagtggaagcgccagggcaacctccagctcggcacctggaactacatgatcatggccaccgagggctaccagagctctggttcggccactatcgaggtccgggaggcctaa

SEQ ID NO: 330 - protein, 218 aa, Myceliophthora thermophilia
MVSFTLLLTVIAAAVTTASPLEVVKRGIQPGTGTHEGYFYSFWTDGRGSVDFNPGPRGSYSVTWNNVNNWVGGKGWNPGPPRKIAYNGTWNNYNVNSYLALYGWTRNPLVEYYIVEAYGTYNPSSGTARLGTIEDDGGVYDIYKTTRYNQPSIEGTSTFDQYWSVRRQKRVGGTIDTGKHFDEWKRQGNLQLGTWNYMIMATEGYQSSGSATIEVREA

SEQ ID NO: 331 - DNA, 250 bp, Myceliophthora thermophilia
  CDS (1)...(249)
atggtttctgtcaaggcagtcctcctcctcggcgccgccggcaccaccctggccttcccgttcaacgctacccagttcagcgagctcgttgcccgggccggcaccccgagcggcaccggcacgcacgacggcttctactactccttctggaccgacggcggcggcaacgtcaactacgaggacggtcctggcggctcctacaccgtccagtggcagaactgcggcaactttgaacggaccgcaagggctg

SEQ ID NO: 332 - protein, 83 aa, Myceliophthora thermophilia
MVSVKAVLLLGAAGTTLAFPFNATQFSELVARAGTPSGTGTHDGFYYSFWTDGGGNVNYEDGPGGSYTVQWQNCGNFERTARA

SEQ ID NO: 333 - DNA, 1560 bp, Myceliophthora thermophilia
  CDS (1)...(1560)
atgtacgccaagttcgcgaccctcgccgcccttgtggctggcgccgctgctcagaacgcctgcactctgaccgctgagaaccacccctcgctgacgtggtccaagtgcacgtctggcggcagctgcaccagcgtccagggttccatcaccatcgacgccaactggcggtggactcaccggaccgatagcgccaccaactgctacgagggcaacaagtgggatacttcgtactgcagcgatggtccttcttgcgcctccaagtgctgcatcgacggcgctgactactcgagcacctatggcatcaccacgagcggtaactccctgaacctcaagttcgtcaccaagggccagtactcgaccaacatcggctcgcgtacctacctgatggagagcgacaccaagtaccagatgttccagctcctcggcaacgagttcaccttcgatgtcgacgtctccaacctcggctgcggcctcaatggcgccctctacttcgtgtccatggatgccgatggtggcatgtccaagtactcgggcaacaaggcaggtgccaagtacggtaccggctactgtgattctcagtgcccccgcgacctcaagttcatcaacggcgaggccaacgtagagaactggcagagctcgaccaacgatgccaacgccggcacgggcaagtacggcagctgctgctccgagatggacgtctgggaggccaacaacatggccgccgccttcactccccacccttgcaccgtgatcggccagtcgcgctgcgagggcgactcgtgcggcggtacctacagcaccgaccgctatgccggcatctgcgaccccgacggatgcgacttcaactcgtaccgccagggcaacaagaccttctacggcaagggcatgacggtcgacacgaccaagaagatcacggtcgtcacccagttcctcaagaactcggccggcgagctctccgagatcaagcggttctacgtccagaacggcaaggtcatccccaactccgagtccaccatcccgggcgtcgagggcaactccatcacccaggactggtgcgaccgccagaaggccgccttcggcgacgtgaccgacttccaggacaagggcggcatggtccagatgggcaaggccctcgcggggcccatggtcctcgtcatgtccatctgggacgaccacgccgtcaacatgctctggctcgactccacctggcccatcgacggcgccggcaagccgggcgccgagcgcggtgcctgccccaccacctcgggcgtccccgctgaggtcgaggccgaggcccccaactccaacgtcatcttgtccaacatccgcttcggccccatcggctccaccgtctccggcctgcccgacggcggcagcggcaaccccaacccgcccgtcagctcgtccaccccggtcccctcctcgtccaccacatcctccggttcctccggcccgactggcggcacgggtgtcgctaagcactatgagcaatgcggaggaatcgggttcactggccctacccagtgcgagagcccctacacttgcaccaaagctgaatga

SEQ ID NO: 334 - protein, 519 aa, Myceliophthora thermophilia
MYAKFATLAALVAGAAAQNACTLTAENHPSLTWSKCTSGGSCTSVQGSITIDANWRWTHRTDSATNCYEGNKWDTSYCSDGPSCASKCCIDGADYSSTYGITTSGNSLNLKFVTKGQYSTNIGSRTYLMESDTKYQMFQLLGNEFTFDVDVSNLGCGLNGALYFVSMDADGGMSKYSGNKAGAKYGTGYCDSQCPRDLKFINGEANVENWQSSTNDANAGTGKYGSCCSEMDVWEANNMAAAFTPHPCTVIGQSRCEGDSCGGTYSTDRYAGICDPDGCDFNSYRQGNKTFYGKGMTVDTTKKITVVTQFLKNSAGELSEIKRFYVQNGKVIPNSESTIPGVEGNSITQDWCDRQKAAFGDVTDFQDKGGMVQMGKALAGPMVLVMSIWDDHAVNMLWLDSTWPIDGAGKPGAERGACPTTSGVPAEVEAEAPNSNVILSNIRFGPIGSTVSGLPDGGSGNPNPPVSSSTPVPSSSTTSSGSSGPTGGTGVAKHYEQCGGIGFTGPTQCESPYTCTKAE

SEQ ID NO: 335 - DNA, 2604 bp, Myceliophthora thermophilia
  CDS (1)...(2604)
atggctgcggatgcgacgcagccttccttcgcgctgtacaaacagctccgggaacgtcgactggttcaccagaagcccctcgcgagatctgaacctttttacccgtcgccatggatgaatcccaacgccgacggctgggcggaggcctatgcccaggccaagtcctttgtctcccaaatgactctgctagagaaggtcaacttgaccacgggagtcggctggggggctgagcagtgcgtcggccaagtgggcgcgatccctcgccttggacttcgcagtctgtgcatgcatgactcccctctcggcatccgaggagccgactacaactcagcgttcccctctggccagaccgttgctgctacctgggatcgcggtctgatgtaccgtcgcggctacgcaatgggccaggaggccaaaggcaagggcatcaatgtccttctcggaccagtcgccggcccccttggccgcatgcccgagggcggtcgtaactgggaaggcttcgctccggatcccgtccttaccggcatcggcatgtccgagacgatcaagggcattcaggatgctggcgtcatcgcttgtgcgaagcactttattggaaacgagcaggagcacttcagacaggtgccagaagcccagggatacggttacaacatcagcgaaaccctctcctccaacattgacgacaagaccatgcacgagctctacctttggccgtttgccgatgccgtccgggccggcgtcggctctgtcatgtgctcgtaccagcaggtcaacaactcgtacgcctgccagaactcgaagctgctgaacgacctcctcaagaacgagcttgggtttcagggcttcgtcatgagcgactggcaggcacagcacactggcgcagcaagcgccgtggctggtctcgatatgtccatgccgggcgacacccagttcaacactggcgtcagtttctggggcgccaatctcaccctcgccgtcctcaacggcacagtccctgcctaccgtctcgacgacatggccatgcgcatcatggccgccctcttcaaggtcaccaagaccacccacctggaacccatcaacttctccttctggaccgacgacacttatggcccgatccactgggccgccaagcagggctaccagaagattaattcccacgttgacgtccgcgccgaccacggcaacctcatccgggagattgccgccaagggtacggtgctgctgaagaataccggctctctacccctgaacaagccaaagttcgtggccgtcatcggcgaggatgctgggtcgagccccaacgggcccaacggctgcagcgaccgcggctgtaacgaaggcacgctcgccatgggctggggatccggcacagccaactatccgtacctcgtttcccccgacgccgcgctccaggcccgggccatccaggacggcacgaggtacgagagcgtcctgtccaactacgccgaggaaaagacaaaggctctggtctcgcaggccaatgcaaccgccatcgtcttcgtcaatgccgactcaggcgagggctacatcaacgtggacggtaacgagggcgaccgtaagaacctgactctctggaacaacggtgatactctggtcaagaacgtctcgagctggtgcagcaacaccatcgtcgtcatccactcggtcggcccggtcctcctgaccgattggtacgacaaccccaacatcacggccattctctgggctggtcttccgggccaggagtcgggcaactccatcaccgacgtgctttacggcaaggtcaaccccgccgcccgctcgcccttcacttggggcaagacccgcgaaagctatggcgcggacgtcctgtacaagccgaataatggcaatggtgcgccccaacaggacttcaccgagggcgtcttcatcgactaccgctacttcgacaaggttgacgatgactcggtcatctacgagttcggccacggcctgagctacaccaccttcgagtacagcaacatccgcgtcgtcaagtccaacgtcagcgagtaccggcccacgacgggcaccacggcccaggccccgacgtttggcaacttctccaccgacctcgaggactatctcttccccaaggacgagttcccctacatctaccagtacatctacccgtacctcaacacgaccgacccccggagggcctcggccgatccccactacggccagaccgccgaggagttcctcccgccccacgccaccgatgacgacccccagccgctcctccggtcctcgggcggaaactcccccggcggcaaccgccagctgtacgacattgtctacacaatcacggccgacatcacgaatacgggctccgttgtaggcgaggaggtaccgcagctctacgtctcgctgggcggtcccgaggatcccaaggtgcagctgcgcgactttgacaggatgcggatcgaacccggcgagacgaggcagttcaccggccgcctgacgcgcagagatctgagcaactgggacgtcacggtgcaggactgggtcatcagcaggtatcccaagacggcatatgttgggaggagcagccggaagttggatctcaagattgagcttccttga

SEQ ID NO: 336 - protein, 867 aa, Myceliophthora thermophilia
MAADATQPSFALYKQLRERRLVHQKPLARSEPFYPSPWMNPNADGWAEAYAQAKSFVSQMTLLEKVNLTTGVGWGAEQCVGQVGAIPRLGLRSLCMHDSPLGIRGADYNSAFPSGQTVAATWDRGLMYRRGYAMGQEAKGKGINVLLGPVAGPLGRMPEGGRNWEGFAPDPVLTGIGMSETIKGIQDAGVIACAKHFIGNEQEHFRQVPEAQGYGYNISETLSSNIDDKTMHELYLWPFADAVRAGVGSVMCSYQQVNNSYACQNSKLLNDLLKNELGFQGFVMSDWQAQHTGAASAVAGLDMSMPGDTQFNTGVSFWGANLTLAVLNGTVPAYRLDDMAMRIMAALFKVTKTTHLEPINFSFWTDDTYGPIHWAAKQGYQKINSHVDVRADHGNLIREIAAKGTVLLKNTGSLPLNKPKFVAVIGEDAGSSPNGPNGCSDRGCNEGTLAMGWGSGTANYPYLVSPDAALQARAIQDGTRYESVLSNYAEEKTKALVSQANATAIVFVNADSGEGYINVDGNEGDRKNLTLWNNGDTLVKNVSSWCSNTIVVIHSVGPVLLTDWYDNPNITAILWAGLPGQESGNSITDVLYGKVNPAARSPFTWGKTRESYGADVLYKPNNGNGAPQQDFTEGVFIDYRYFDKVDDDSVIYEFGHGLSYTTFEYSNIRVVKSNVSEYRPTTGTTAQAPTFGNFSTDLEDYLFPKDEFPYIYQYIYPYLNTTDPRRASADPHYGQTAEEFLPPHATDDDPQPLLRSSGGNSPGGNRQLYDIVYTITADITNTGSVVGEEVPQLYVSLGGPEDPKVQLRDFDRMRIEPGETRQFTGRLTRRDLSNWDVTVQDWVISRYPKTAYVGRSSRKLDLKIELP

SEQ ID NO: 337 - DNA, 1197 bp, Myceliophthora thermophilia
  CDS (1)...(1197)
atgcaccacccgcccccttcccatctgccggttgcccacgtcgccgtcgactgcttgtccgcttcctacctgcagcctctttcagagaccatcaaacatgcgtactcttacgcggcggtcaaggctggacaggtcccacgacctgcgtttctggcgcagtatgccaattcgtcaagtcatgactggtactcccaatgcgtgcccggatcgagcaaccctcctacgggcaccaccagcagcaccactggaagcaccccggctcctactggcggcggcggcagcggaaccggcctccacgacaaattcaaggccaagggcaagctctacttcggaaccgagatcgatcactaccatctcaacaacaatgccttgaccaacattgtcaagaaagactttggtcaagtcactcacgagaacagcttgaagtgggatgctactgagccgagccgcaatcaattcaactttgccaacgccgacgcggttgtcaactttgcccaggccaacggcaagctcatccgcggccacaccctcctctggcactctcagctgccgcagtgggtgcagaacatcaacgaccgcaacaccttgacccaggtcatcgagaaccacgtcaccacccttgtcactcgctacaagggcaagatcctccactgggacgtcgttaacgagatctttgccgaggacggctcgctccgcgacagcgtcttcagccgcgtcctcggcgaggactttgtcggcatcgccttccgcgccgcccgcgccgccgatcccaacgccaagctctacatcaacgactacaacctcgacattgccaactacgccaaggtgacccggggcatggtcgagaaggtcaacaagtggatcgcccagggcatcccgatcgacggcatcggcacccagtgccacctggccgggcccggcgggtggaacacggccgccggcgtccccgacgccctcaaggccctcgccgcggccaacgtcaaggagatcgccatcaccgagctcgacatcgccggcgcctccgccaacgactacctcaccgtcatgaacgcctgcctccaggtctccaagtgcgtcggcatcaccgtctggggcgtctctgacaaggacagctggaggtcgagcagcaacccgctcctcttcgacagcaactaccagccaaaggcggcatacaatgctctgattaatgccttgtaa

SEQ ID NO: 338 - protein, 398 aa, Myceliophthora thermophilia
MHHPPPSHLPVAHVAVDCLSASYLQPLSETIKHAYSYAAVKAGQVPRPAFLAQYANSSSHDWYSQCVPGSSNPPTGTTSSTTGSTPAPTGGGGSGTGLHDKFKAKGKLYFGTEIDHYHLNNNALTNIVKKDFGQVTHENSLKWDATEPSRNQFNFANADAVVNFAQANGKLIRGHTLLWHSQLPQWVQNINDRNTLTQVIENHVTTLVTRYKGKILHWDVVNEIFAEDGSLRDSVFSRVLGEDFVGIAFRAARAADPNAKLYINDYNLDIANYAKVTRGMVEKVNKWIAQGIPIDGIGTQCHLAGPGGWNTAAGVPDALKALAAANVKEIAITELDIAGASANDYLTVMNACLQVSKCVGITVWGVSDKDSWRSSSNPLLFDSNYQPKAAYNALINAL

SEQ ID NO: 339 - DNA, 1146 bp, Myceliophthora thermophilia
  CDS (1)...(1146)
atgcgcgtctctagtttggtcgcggcccttgctaccggtggtcttgtcgccgccacgcctaagcccaaggggtcgtcgccccctggggccgtggacgcgaaccctttcaagggcaagacgcagttcgtcaacccggcatgggcggccaagctggaacagaccaaaaaggcgttcctggccaggaacgacaccgtcaatgccgccaagacggagaaggtccagcagaccagctcgttcgtctgggtctcgaggatcgccgagctctccaacatcgacgacgccatcgcggctgcccgcaaggcgcagaagaagacgggcaggaggcagatcgtcggcctggtgctctacaaccttccggaccgcgactgcagcgcgggcgagagcgcgggcgagctcagcagcgacaagaacgggctcgagatctacaagactgagttcgtcaagcccttcgccgacaaggtggcggccgcaaaggacctcgacttcgccatcgtcctggagcccgactcgctggccaacctggtcaccaacctgggcatcgagttctgcgccaacgccgcccccgtctaccgcgagggcatcgcctatgccatctccagccttcagcagccaaacgtgcacttgtacatcgatgctgcccacggcggctggctcggctgggacgacaacctgccgctggccgccaaggagtttgccgaggtggtcaagcttgccggcgagggcaagaagatccgcggcttcgtcaccaacgtgtccaactacaaccccttccacgccgtcgtgcgcgagaactttaccgagtggagcaactcgtgggacgagtctcactacgcctcctcgctcacaccgttcctcgagaaagaggggctgccggcacgcttcatcgtcgaccagggtcgcgttgccctcccgggagcccgcaaggagtggggtgaatggtgcaacgtggcacccgccggatttggccccgcgcccacgaccagggtcaacaacaccgtcgtcgatgctctcgtctgggtcaagcctggcggcgagagcgacggcgagtgtggcttggctggcgcccccaaggccggccagtggttcgacgagtacgcccagatgctggtcgagaatgcccacccgtctgtcgtccacaagtggtag

SEQ ID NO: 340 - protein, 381 aa, Myceliophthora thermophilia
MRVSSLVAALATGGLVAATPKPKGSSPPGAVDANPFKGKTQFVNPAWAAKLEQTKKAFLARNDTVNAAKTEKVQQTSSFVWVSRIAELSNIDDAIAAARKAQKKTGRRQIVGLVLYNLPDRDCSAGESAGELSSDKNGLEIYKTEFVKPFADKVAAAKDLDFAIVLEPDSLANLVTNLGIEFCANAAPVYREGIAYAISSLQQPNVHLYIDAAHGGWLGWDDNLPLAAKEFAEVVKLAGEGKKIRGFVTNVSNYNPFHAVVRENFTEWSNSWDESHYASSLTPFLEKEGLPARFIVDQGRVALPGARKEWGEWCNVAPAGFGPAPTTRVNNTVVDALVWVKPGGESDGECGLAGAPKAGQWFDEYAQMLVENAHPSVVHKW

SEQ ID NO: 341 - DNA, 3294 bp, Myceliophthora thermophilia
  CDS (1)...(3294)
atgatgttcaggtggcttttgatcgggctcggggttctggcgcacaagggctgtgcaggcagcgagagcgacgacaagtattacgattacatcgtcgtcggcagtggacctggaggagggcctctcgcaagcaacctagcacgggcgggttattctgtcttgctgctcgaggcggggagtgatcaaagcaacaacaccaattctgagattgtctcattgtttggggttgcttacaccgatcccactctgcgctgggacttcttcgccttcaactttgcaaacgagacgcggaacttgcagcacaaccatctgacctggcgccgtcccgatggctcgttctatgtcggccgggacccgccccctaattcgaccctgctggggatctattatcctcgcggcggtactctggggggaagctctgccgtcaatgctatgtcgacgatctaccctagcgagagtgattggcaaaacattgttgacttgactggtgacacaacatggagcccagaacatatgcgagagatttttgagcgcatcgagaagaaccattacctgacccctggggctccaggtcacggattcaacggctacctcgacacgattatgagcaccgagacctcctgggctggtcagaacgatcttctagccgtcctcggagccatctctgggcaccttggccagagcccaagcgacatcgccaccaatgtgctcgcagaccccaacggtcctattccggagcgcgaccagaccgagggcattttcggcagcccactgcacgcggacgcagcatggagacgcttcagttcccgcgactatatcctcgagaccgccagggcggtgggtccggatgggcagaagcagtaccagctcactgtccagctcgaaacgttggccaccaaggtgctcttcgccgatctagacgacccgcagaagaaacctagggcgaacggcgtcgagtttcttcaagggcagagtgtttatagcgcagacccccgccacacagcttctaaccagggaaccaccgggcgtgcgtatgctcgcaaggaggtgatcctctccggtggcactttcaactcgcctcagctgcttaagctctctggcatcgggcccgcgtcggagcttgcccagttcgacatcgatgtggttgtcgacctccccggagttggcgcgaatctgcaggacaattacgaggttcctgttgtgggacacgctgcccgggacttccagcagccggcacccgatccggacgctccgacgtgcacttacggggcgccgggcgacccctgcgtagaactctggaagcagggacgagggccatacacggtaggacctcccttgaacagcatcttccgcaagagcgctcatgctgcctacgacgagcgcgaccttttcttggttggcggtacctttgctctgcgcgggttttggccgcccactgactcggtaccggtcgaccccccaaacacgtttgggctgtcaacggtcaagatcaacccgcagagccgatcgggcaccgtcttgttgaggagcgccgacccccgagacacacccgtgatcaacttccacctgttcgaagaggacaacgcgggcactgagctcgatctgaacgccgagcttgacacggtcaagtgggcacgccgtgcatttgctgacgttcctgctccgctggggcccattgtcccggttgaaccgccctgcccgggaacgccggctgcggacggcacttgcgacgacgagaccgaccgggagtggatcaagaatcagatctttggacaccatcccacaagcacatgtgctatcggcgccgacagcgaccccctggccgtactggactctaagtttagagtccgtggcgtccgaggtcttcgagtcgtcgatgcgagcgcgttccctcgcgttcccggcccgttccctgttctcccgacatttatgctcatcaagatgaagcagtacctccagtacctcgcggcgaccctgcccctggtgggcctggccacggcccagcaggcgggtaacctgcagaccgagactcaccccaagctcacttggtcgaagtgcacggccccgggatcctgccaacaggtcaacggcgaggtcgtcatcgactccaactggcgctgggtgcacgacgagaacgcgcagaactgctacgacggcaaccagtggaccaacgcttgcagctctgccaccgactgcgccgagaattgcgcgctcgagggtgccgactaccagggcacctatggcgcctcgaccagcggcaatgccctgacgctcaccttcgtcactaagcacgagtacggcaccaacattggttcgcgcctctacctcatgaacggcgcgaacaagtaccagatgttcaccctcaagggcaacgagctggccttcgacgtcgacctctcggccgtcgagtgcggcctcaacagcgccctctacttcgtggccatggaggaggatggcggtgtgtcgagctacccgaccaacacggccggtgctaagttcggcactgggtactgcgacgcccaatgcgcacgcgacctcaagttcgtcggcggcaagggcaacatcgagggctggaagccgtccaccaacgatgccaatgccggtgtcggtccttatggcgggtgctgcgctgagatcgacgtctgggagtcgaacaagtatgctttcgctttcaccccgcacggttgcgagaaccctaaataccacgtctgcgagaccaccaactgcggtggcacctactccgaggaccgcttcgctggtgactgcgatgccaacggctgcgactacaacccctaccgcatgggcaaccaggacttctacggtcccggcttgacggtcgataccagcaagaagttcaccgtcgtcagccagttcgaggagaacaagctcacccagttcttcgtccaggacggcaagaagattgagatccccggccccaaggtcgagggcatcgatgcggacagcgccgctatcacccctgagctgtgcagtgccctgttcaaggccttcgatgaccgtgaccgcttctcggaggttggcggcttcgatgccatcaacacggccctcagcactcccatggtcctcgtcatgtccatctgggatgatcactacgccaatatgctctggctcgactcgagctacccccctgagaaggctggccagcctggcggtgaccgtggcccgtgtcctcaggactctggcgtcccggccgacgttgaggctcagtaccctaatgccaaggtcatctggtccaacatccgcttcggccccatcggctcgactgtcaacgtctaa

SEQ ID NO: 342 - protein, 1097 aa, Myceliophthora thermophilia
MMFRWLLIGLGVLAHKGCAGSESDDKYYDYIVVGSGPGGGPLASNLARAGYSVLLLEAGSDQSNNTNSEIVSLFGVAYTDPTLRWDFFAFNFANETRNLQHNHLTWRRPDGSFYVGRDPPPNSTLLGIYYPRGGTLGGSSAVNAMSTIYPSESDWQNIVDLTGDTTWSPEHMREIFERIEKNHYLTPGAPGHGFNGYLDTIMSTETSWAGQNDLLAVLGAISGHLGQSPSDIATNVLADPNGPIPERDQTEGIFGSPLHADAAWRRFSSRDYILETARAVGPDGQKQYQLTVQLETLATKVLFADLDDPQKKPRANGVEFLQGQSVYSADPRHTASNQGTTGRAYARKEVILSGGTFNSPQLLKLSGIGPASELAQFDIDVVVDLPGVGANLQDNYEVPVVGHAARDFQQPAPDPDAPTCTYGAPGDPCVELWKQGRGPYTVGPPLNSIFRKSAHAAYDERDLFLVGGTFALRGFWPPTDSVPVDPPNTFGLSTVKINPQSRSGTVLLRSADPRDTPVINFHLFEEDNAGTELDLNAELDTVKWARRAFADVPAPLGPIVPVEPPCPGTPAADGTCDDETDREWIKNQIFGHHPTSTCAIGADSDPLAVLDSKFRVRGVRGLRVVDASAFPRVPGPFPVLPTFMLIKMKQYLQYLAATLPLVGLATAQQAGNLQTETHPKLTWSKCTAPGSCQQVNGEVVIDSNWRWVHDENAQNCYDGNQWTNACSSATDCAENCALEGADYQGTYGASTSGNALTLTFVTKHEYGTNIGSRLYLMNGANKYQMFTLKGNELAFDVDLSAVECGLNSALYFVAMEEDGGVSSYPTNTAGAKFGTGYCDAQCARDLKFVGGKGNIEGWKPSTNDANAGVGPYGGCCAEIDVWESNKYAFAFTPHGCENPKYHVCETTNCGGTYSEDRFAGDCDANGCDYNPYRMGNQDFYGPGLTVDTSKKFTVVSQFEENKLTQFFVQDGKKIEIPGPKVEGIDADSAAITPELCSALFKAFDDRDRFSEVGGFDAINTALSTPMVLVMSIWDDHYANMLWLDSSYPPEKAGQPGGDRGPCPQDSGVPADVEAQYPNAKVIWSNIRFGPIGSTVNV

SEQ ID NO: 343 - DNA, 1188 bp, Myceliophthora thermophilia
  CDS (1)...(1188)
atggggccgattcgtcgcattctctgtctccccacgtccctttcctcactcgtcttcttcctcgtctcggccaccgctcccggaatagcggcggcggggaaagaccctgccttgactgatgattcacaatgcggctgctacctgaacaagggcaactccagcacctacttcacatatcaccgattctttgacttccggagcctcccccagtacgcgggcgtgccggccgtcatccaggacgccgagtccagcccggatgccgacccgacgagcgactacttcaagcgggacgagtggtcgagcttctggctgctgggcagctggaacaacagcaacggggcgcggcccgacgccaccgtgaccatggtcaactcgcctaacaacgtctacatcgaggccaacacggagccggacccgtcgtcgcagacgtacctgacgctgcgcacgcagcggctgagcgacttccagacggcggccgagatcgagtcggcctcgtcgggcttcaagtacctgtcgctgcgcatgcgcgcgcgcacggtgggtgcggcgggcgccatcacggccgtcttcacctaccgcggttcggacatgctcgcggacgtgcaggagtcggacctcgagatccgcacggctgacaagcgcaacctggtgcactacaccaaccagccggcctacaccgacgacggcgacgtcgtgcccgaggccacccgcaaggccaccatgccgcacggcctcgactggaccgcctgggccatccaccgcctcgactggaccccgggcctaacgacctggtatgtcgacgacgtcgaggttgcccgcattgccttccaggcgccccgcgacgagagcaacatcatcctcaacgcctggagcgacggcggccgttggaccggcaacatgacccgcttcgacgccgcctacctgcaggtccagtggctcgagctgctctacaacagcaccgacccggacgagacgaagcggagtaggcggcggcagcagcaggacggggacgggtgcaacgccgtctgcagcatcgacgagacgccggagctgggtaccccggtgctgctctggaaaaacgggccgtctcaggtcaacggcgccggcggcaggagcgtctcgacgggttcggtgccgatctggggggtcgtggtgatggtgctgtttgcaatggagctgttcatctaa

SEQ ID NO: 344 - protein, 395 aa, Myceliophthora thermophilia
MGPIRRILCLPTSLSSLVFFLVSATAPGIAAAGKDPALTDDSQCGCYLNKGNSSTYFTYHRFFDFRSLPQYAGVPAVIQDAESSPDADPTSDYFKRDEWSSFWLLGSWNNSNGARPDATVTMVNSPNNVYIEANTEPDPSSQTYLTLRTQRLSDFQTAAEIESASSGFKYLSLRMRARTVGAAGAITAVFTYRGSDMLADVQESDLEIRTADKRNLVHYTNQPAYTDDGDVVPEATRKATMPHGLDWTAWAIHRLDWTPGLTTWYVDDVEVARIAFQAPRDESNIILNAWSDGGRWTGNMTRFDAAYLQVQWLELLYNSTDPDETKRSRRRQQQDGDGCNAVCSIDETPELGTPVLLWKNGPSQVNGAGGRSVSTGSVPIWGVVVMVLFAMELFI

SEQ ID NO: 345 - DNA, 1818 bp, Myceliophthora thermophilia
  CDS (1)...(1818)
atggccgtcatgagtatccggaagttcctgcgcctcgctctggcggcggcagtcttccttgcttcctacgtgttcctgagccaaacggactttgtttacgtcgtctacaagggccggcaatggcgctcctggaagtacgtcccgagcagcttcgactggggaaagcggccagaagctcatcctgtcgaggaggacatcatggtccgcctgcccgagggaaacccgctccagctgccccgggtgcagcacgatttctccgcagacgagctgagcagctcccacaacgagacgcagagggcacgccgagacgccgttcggaaggcggccaagaggtcctggagggcctacagcaagcacgcctggggccgtgaccaggttgcgcctcagtcgctgatcggccaggacaccttcgccggatggggggccacgctggtggactctctcgacaccctctggatcatgggcatggagaaggagttccgggatgcggtcgggcacgtcgccaccatcgactgggacaacgcgacctcgggccactgcagcctgttcgagaccaacatcaggtacctgggcggcttgctgtccgcctacgacctgagccaggagcagatcctgctcgacaaggccgtcgagctcggcaacatgctctatgccgcgttcgacacgcccaaccacatgcctgccaacagcttcagcttcgacctggccaaggagggcaagctgaccgccagcgaccacgaggcctcggccgcggtcggctccctctcgctcgagttcacccggctctcgcagctgaccggcgacccgaaatactaccacgcgatcgacggggtcaagaggcatctagagaggacccaggactcgaccagcctgcccggcatgtggcccatctttgtcgacctcgagaacgacttcctcaccccgggcacgtcctactcgctcggcgcctcggccgactcggcctacgagtacctgtccaagatgtacgccctcctcggcggcctggacccgacctacgagaagctccacaccaaggccatggccacggccgagaaacacgtcctcttccggcccatgctgcccgacccggccccggacgtcctgttccccggcacggtcctctccaacgggcgcatcgtcgagctctccccggagatcaagcacctggcatgcttcgccggcggcaagttcgccctcggcggccggctcttccggaacgaggagcacgtcgaggtgggcaagcggctcgcgcgcggctgcgcctgggcgtacgatgccttcccgacgggcatcatgcccgagaaggcggagctgatcccctgccgcgtcgaagagaaggaggggaggaagaaggaggaggaggggggagagggagacagcaacctcgcgccgtgtgcgtggaacgagacccggtggagggagagggcccgggagcgccgggcgggcgagctgccgccccgggggttcgcggcgctgctcgacccgcagtaccagctccggcccgaggccatcgagagcatcttcgtcctctaccgcgtcacgggcaaggcggacctgctggacgtggcctggcgcatgttcgagtccgtcacggccgcgacgcgcacccggttcgcctactcggccatcgacgacgtgcgcgccaccggggagacgggcaagctcgattccatggagagcttctggatcgccgagacgctcaagtacttttaccttattttctcggagccagacctcataaatctggacgactacgtgtttaacacggaggcgcatccgttcaaacggccaagaccgaacaacggcgatgaggagtga

SEQ ID NO: 346 - protein, 605 aa, Myceliophthora thermophilia
MAVMSIRKFLRLALAAAVFLASYVFLSQTDFVYVVYKGRQWRSWKYVPSSFDWGKRPEAHPVEEDIMVRLPEGNPLQLPRVQHDFSADELSSSHNETQRARRDAVRKAAKRSWRAYSKHAWGRDQVAPQSLIGQDTFAGWGATLVDSLDTLWIMGMEKEFRDAVGHVATIDWDNATSGHCSLFETNIRYLGGLLSAYDLSQEQILLDKAVELGNMLYAAFDTPNHMPANSFSFDLAKEGKLTASDHEASAAVGSLSLEFTRLSQLTGDPKYYHAIDGVKRHLERTQDSTSLPGMWPIFVDLENDFLTPGTSYSLGASADSAYEYLSKMYALLGGLDPTYEKLHTKAMATAEKHVLFRPMLPDPAPDVLFPGTVLSNGRIVELSPEIKHLACFAGGKFALGGRLFRNEEHVEVGKRLARGCAWAYDAFPTGIMPEKAELIPCRVEEKEGRKKEEEGGEGDSNLAPCAWNETRWRERARERRAGELPPRGFAALLDPQYQLRPEAIESIFVLYRVTGKADLLDVAWRMFESVTAATRTRFAYSAIDDVRATGETGKLDSMESFWIAETLKYFYLIFSEPDLINLDDYVFNTEAHPFKRPRPNNGDEE

SEQ ID NO: 347 - DNA, 2577 bp, Myceliophthora thermophilia
  CDS (1)...(2577)
atggcaccccgcgttgtgatcccgctcgaccagaactgggagttccggcaggcggacaagccagactccaagttcctgcccgtcagccagttcccgactaacgtccacctcgacctgcaacaccacggcctgatcccggacccgttcatcggcaagaatgagctcctcgtccagtgggtgggcgaggcgcaatggacctacaggaccgtcttcgcggcgccgccggtgcccgagggcgccagggcagtaatcgcgttcgacggcctcgacactttcgcgaccgtggtgctcaatggcaccaccatcctcgagtcggacaacatgttcctcccgcatcgcgtcgaagtgacctcggtcctgaaggccgaaggtaacgagctcgtcatcacgtttgacagcgcctacctgcggggctgcaagctggtcgagcagcacccgaaccacaagtggggttgctggaacggcgacgtctcgcggctggccgtgcgcaaggcgcagtaccactggggctgggattggggcccgactctcctgacctgcggcccctggcggccggtccacctcgagatatacgagtcgcgcctgtccgatctctacgccgagacggtcgtcgacaagtcgctgaagcgggccagcgtcaaggtgacagcagtcgcagagcgcagggcggacagggtgcggttcgacatcgccctcgacggccagcaggtggccaccgagacagccgagctggacgccacgtcgggcgaggctaccgtgtcgttcctcatcgacagccccgcgctgtggtacccggtccgctatggcaagcagccgctctacgacatccgggcaaccctgctcgccggcgacgatgaggtcgacacgctttccaagcggatcggcctgcgccgcgccgagctgatccaacggccactggaaggccagccaggtacgagcttcttcttcgaggtcaacaacatccgcatctactgcggcggcagcgactggatccctgccgacaacttcatcccgcgtatcagccgtcggcgctactatgactgggtcaggctggtggccgagggcaaccagttcatgatccgcgtctggggcggcggcatctacgaagagcaggccttctacgacgcttgcgacgagctcggcatcctggtctggcaggacttcatgttcggctgcggcaactacccggcctggccggccctgctcgagtccatcaggcgcgaggccaccgagaacgtcaagcggctgcgccaccacccctccattgtcatctgggccggcaacaacgaggactaccagtaccaggagtcggagggcctcacgtacgactacgccaacaaggacgccgagagctggctcaagaccgacttcccggcccgctacatctacgagaagatcctggccgacgtgtgcgccgacctggtccccagcaccccctaccacccgggctcgccctggggcgccgggctcaatacgcacgacgccaccgtcggcgacatccatcagtggaacgtgtggcacggcacgcaggagaagtggcagaacttcgaccggctggtcggccggttcgtgtccgagttcggcatgcaggccttcccggccgtcaagaccatcgacgcctacctgcccctgggccgggacgacccggaccggtacccgcagtcgtcgacggtcgacttccacaacaaggccgagggccacgagcggcgcatcgcgctgtacctggtcgagaatctgcgctacgcgcccgacccgctcgagcactttgtctactgcacgcagctgatgcagggcgagtgcctggcctcggcctaccgcctctggaagcgcgagtggcgcggacccgggcgcgagtactgcggcggcgcgctggtctggcagaccaacgactgctggcccgtcacgagctggagcatcgtcgactactacctgcgccccaagctggcctacttcacggtcaagcgcgagatggcgcccgtgagcatcggcatcacgcgcaggacgcacctgcacccgcgcgaccggcacacccgagtcaacgtggacgtcaagacgcagatcgaggtgtgggccagcaacctgaccctcgaggacttgacggtcgactgcgtactcaaggcctgggacgtcgagagcggcgaggagaccttctccgagacggtggcggcggcgctgctcctgcgggagaaccggtcgaccgagatcgccgcgctggacgttcccgtccggcagaagaacgtcggggaggagggccggatcgtggtggcggcctatctggtcgacaaggagggcaggcagatggcccgctacgtcaactggcccgagccgctcaagtacgtgcacctgcagaagcctcgggcgctccgggcgcagctgactgccgattactcggcggtcgaggtcagcgccgaggtgccagtcaagggcgtcgcgctggagtgcgaggatgacggggtccgattcgacgacaacctggtggatattgtgccgggcgaggtggtcaccatcggcgtcagcggggcgggcaaggacaccaagatcgagacgcggaacgatgaggaagctcattacgaatga

SEQ ID NO: 348 - protein, 858 aa, Myceliophthora thermophilia
MAPRVVIPLDQNWEFRQADKPDSKFLPVSQFPTNVHLDLQHHGLIPDPFIGKNELLVQWVGEAQWTYRTVFAAPPVPEGARAVIAFDGLDTFATVVLNGTTILESDNMFLPHRVEVTSVLKAEGNELVITFDSAYLRGCKLVEQHPNHKWGCWNGDVSRLAVRKAQYHWGWDWGPTLLTCGPWRPVHLEIYESRLSDLYAETVVDKSLKRASVKVTAVAERRADRVRFDIALDGQQVATETAELDATSGEATVSFLIDSPALWYPVRYGKQPLYDIRATLLAGDDEVDTLSKRIGLRRAELIQRPLEGQPGTSFFFEVNNIRIYCGGSDWIPADNFIPRISRRRYYDWVRLVAEGNQFMIRVWGGGIYEEQAFYDACDELGILVWQDFMFGCGNYPAWPALLESIRREATENVKRLRHHPSIVIWAGNNEDYQYQESEGLTYDYANKDAESWLKTDFPARYIYEKILADVCADLVPSTPYHPGSPWGAGLNTHDATVGDIHQWNVWHGTQEKWQNFDRLVGRFVSEFGMQAFPAVKTIDAYLPLGRDDPDRYPQSSTVDFHNKAEGHERRIALYLVENLRYAPDPLEHFVYCTQLMQGECLASAYRLWKREWRGPGREYCGGALVWQTNDCWPVTSWSIVDYYLRPKLAYFTVKREMAPVSIGITRRTHLHPRDRHTRVNVDVKTQIEVWASNLTLEDLTVDCVLKAWDVESGEETFSETVAAALLLRENRSTEIAALDVPVRQKNVGEEGRIVVAAYLVDKEGRQMARYVNWPEPLKYVHLQKPRALRAQLTADYSAVEVSAEVPVKGVALECEDDGVRFDDNLVDIVPGEVVTIGVSGAGKDTKIETRNDEEAHYE

SEQ ID NO: 349 - DNA, 912 bp, Myceliophthora thermophilia
  CDS (1)...(912)
atggttcgactgggatcgagcctcgccgggtttgcgctggcagcaagcacggcccgagcaggctcctacactctggtcgacacgtttgacgcaagcaacttcttcgacgagttcgacttcttcaccgagcccgacccgacccacggcttcgtccagtacgtcgacggcgacacggcaaaccgcgaggggctcgccgggtttgcctcgggcggcgtctacctcggcgtcgactacagcagcacgacgacgacgacgacgaccggccgagcgtcggtccggctgacgtcccgaaaggcctacacgaggggcctcttcgtcgccgacatcgcgcacatgccggcgggcgcggccggttctagctcgtgcggcctgtggccggccttttggatgttcggccccgactggcccaactcgggcgagatcgacgtcgtcgagggcgtcaacagccagacgtccaactcggtctcgctccacacgggcgccggctgcaccgtctccaacccgggcgcctcgcccggcaccaagctcgtctcggcagactgccagggcggcgagggctgcacccaggacacgagcgcgcccgacaactacggcgccggcttcaacgctgtcggcggcgggatctacgccgtcgagtggacagacgccgccatcaaggtctggttcctgccgcgggacagccccatcgccagccagctctcttcttctttttcttcttcttcttcttcttctttcccctcgggaggaaacaacaacaacaccaacatcaaggataataaaagcctggacccgtccgccttctgcacgcccctggccgtcttcgccggcggggccgagtgtcttatcggcgaccacttcgccaaccactacctcgtcttcgacaccaccttctgcggctactgggtcggccgg

SEQ ID NO: 350 - protein, 304 aa, Myceliophthora thermophilia
MVRLGSSLAGFALAASTARAGSYTLVDTFDASNFFDEFDFFTEPDPTHGFVQYVDGDTANREGLAGFASGGVYLGVDYSSTTTTTTTGRASVRLTSRKAYTRGLFVADIAHMPAGAAGSSSCGLWPAFWMFGPDWPNSGEIDVVEGVNSQTSNSVSLHTGAGCTVSNPGASPGTKLVSADCQGGEGCTQDTSAPDNYGAGFNAVGGGIYAVEWTDAAIKVWFLPRDSPIASQLSSSFSSSSSSSFPSGGNNNNTNIKDNKSLDPSAFCTPLAVFAGGAECLIGDHFANHYLVFDTTFCGYWVGR

SEQ ID NO: 351 - DNA, 2427 bp, Myceliophthora thermophilia
  CDS (1)...(2427)
atgaacgttcgcgatcccttcaacctccgcaacggcaccttgaaccggccccccatcgccacctggaaggccaacaggaactacaatctccaatacagcagcgcctctccgctgcaacacatcatccgagccgccgccaccgcaacccagtccgcagccgccgacctccgcgacaaggccagcgaggttgttcactcggcacaacaggccttcaccgaggcggccgccaccaccctcgacctcgacctcgagaaagcggcccacctcgagcccggccccgaagccaagcccgaagtcgaacccaaagtcgaagctaaagctaaagcccgggagcatcaccgccgcgaaagcgcccggcccacccacaccgcgagggcccctgcggactccccatcacgacaagaactagcgcccaagaccgagcgtgggcaggcccaagaacaggacatgtcgttcgccatccccaagaatgtaccctcattctccagcccgcagcgccagctcgaagaccaactctgggccgcctcctccaggaaccgccagcgatcttccctcgtaggcaacgtccagggcttcctctcccccggcagccgcgccggcctgcccatgtacaaggacaagccgtacatgtacccgcccggacggggcggcggctcctatgcctggaggcggccgctgtaccggaggaagcggacgacgtgcgccctcctcttgctggtcgtggccgggctggcgtggtggacgggcttgtttgcgggacagcaggcacgggtcggcggaggtcttagttggtccgggtggctggcgcaggagacgggcggggaagcgaacgcggccgagtgggcgaagcggcgggagagagtggtggaggcgatggagttgagttgggatgcttacgagcgatatgcttggggctatgacgagttccatcccgagtcaaagaagggccggcagatggcgcccaaggggttggggtggatcatcatcgactcgctcgacacgttgatgatcatgaacatgaccagccggctgacgcacgcgcgcgagtggttgtccaaatccctgacgtgggatcaggaccaggacgtcaacacgtttgagacgaccattcgtatgctgggcggcttgctgtcggcgcactacctctcgaccgagtatcccgacatggccccaatatcagacgacgacccaggacagcccggggaggatctgtacctggagaaggcaaaggacctggcggaccgcttgatggccgccttcgactcgccgtccggggtcccctacgccagcgtcaatctggcacagtacaagggtatcgtgtcccatgctgacctaggggcgtcatcaacagccgagacgacaactctgcagctggagttcaagtacctcgccaagctgaccggcgagaaggagtattgggacaaggccgagagggtcatgaaactggtggacgacaatggcgcgaaggacggcctggtacccatcttcatctacgccacaacgggcaagttccagggcgagaacatccggctcggcagccgtggcgactcgtactacgaatacctgatcaagcagtacctgcagaccaacaagcaggaacccatctatcaggagatgtggcgggaggcgctgcagggcatcaggaagcacctcatcacctacacggagccgtcccggttcaccatcgtcggtgagcggcccggcggtttgggcggcgacctctcgcccaagatggatcacctcgtctgcttcctgccgggcaccatcgcgctggcggtgacgggcgggctcaccgaacgggaagcgaggaagctacccacctggaccgagcaagacgaggccgacatgcagctcgcgcgcgagctgatgcacacgtgctggggcatgtacaagttcatggcgacgggcctcgccgccgagatcacccacttcaagatcgacaaccctcccctgcccgagtcggccccgcacaaggcgcccgacgagttcgacccgtccccggatgcggagtggcgcaaggacttcgaggtccgtccgttcgacagccacaacctgcagcggcccgagacggccgagagcttgttctacatgtggcgcatcacgggcgacatcaagtaccgcgagtgggggtgggagatgttcaagagcttcatgaactacacggccgtcgccgacaacggcgggttcacgagcctgtccaacgccaacaagatcccgcccgtcacgagggacaacatggagagcttctggctggccgagacgctcaagtatttctacctgctgttctcgcccaacgacctgttgccgctggataagattgtgctcaacaccgaggcgcacccgttcccgcgctttgacatggggccgttattctcgaccgggtggcagcgaaagccgagggataaggaagggaggatcatcgaataa

SEQ ID NO: 352 - protein, 808 aa, Myceliophthora thermophilia
MNVRDPFNLRNGTLNRPPIATWKANRNYNLQYSSASPLQHIIRAAATATQSAAADLRDKASEVVHSAQQAFTEAAATTLDLDLEKAAHLEPGPEAKPEVEPKVEAKAKAREHHRRESARPTHTARAPADSPSRQELAPKTERGQAQEQDMSFAIPKNVPSFSSPQRQLEDQLWAASSRNRQRSSLVGNVQGFLSPGSRAGLPMYKDKPYMYPPGRGGGSYAWRRPLYRRKRTTCALLLLVVAGLAWWTGLFAGQQARVGGGLSWSGWLAQETGGEANAAEWAKRRERVVEAMELSWDAYERYAWGYDEFHPESKKGRQMAPKGLGWIIIDSLDTLMIMNMTSRLTHAREWLSKSLTWDQDQDVNTFETTIRMLGGLLSAHYLSTEYPDMAPISDDDPGQPGEDLYLEKAKDLADRLMAAFDSPSGVPYASVNLAQYKGIVSHADLGASSTAETTTLQLEFKYLAKLTGEKEYWDKAERVMKLVDDNGAKDGLVPIFIYATTGKFQGENIRLGSRGDSYYEYLIKQYLQTNKQEPIYQEMWREALQGIRKHLITYTEPSRFTIVGERPGGLGGDLSPKMDHLVCFLPGTIALAVTGGLTEREARKLPTWTEQDEADMQLARELMHTCWGMYKFMATGLAAEITHFKIDNPPLPESAPHKAPDEFDPSPDAEWRKDFEVRPFDSHNLQRPETAESLFYMWRITGDIKYREWGWEMFKSFMNYTAVADNGGFTSLSNANKIPPVTRDNMESFWLAETLKYFYLLFSPNDLLPLDKIVLNTEAHPFPRFDMGPLFSTGWQRKPRDKEGRIIE

SEQ ID NO: 353 - DNA, 3243 bp, Myceliophthora thermophilia
  CDS (1)...(3243)
atgcaaatcaaaggcatcactctgcaacaggatgagatcaaaccggactacgccaacgaggccgtcttccgacgaaacactctgcctccgcggtcctactacatcccaaagacgtcgcttgctctgaacggccgctggaacttccattacacgtcgactccgttgaaggctcctgttccaagctctggcacccaagcttccccaaccccgtctgcatctgatcatcccgacgaaacgtggacagccatcgaggtccccggccattggcaacttcagggccatggcatcccccattacacaaacgttcagtatccaattcccgtttgcccgccatatgtgcctaccgaaaatccgacggggacttacaagagaaccttccatgtgccgtcctcgtgggatcgtgcatcgcaactccgtctgcgcttcgatggggtcgacagcgcatatcacgtctgggtcaacggaaccttaatcggttacgctcaggggtccagaaaccctcacgagttcgatgttacgccgtacgtcaaccgagacggagccaatgaggtctgggtcagggtataccagtggtctgacggttcttacatcgaggatcaggaccaatggtggctctccggcatttatcgcgacgttcacctcatttcgttgccctcggagacgcgcatcgaagattggtttctacggactgatctcgatgccgagtacagcgacgggacactggacgccaccatcgatgtcgtgacttctacgactgccacagtttccgtggcgttacgagagcttgccaaaaacgggggcgagactctcggagatgcgcagcaggaggtcaatggcgacggcaaggttcacctcaccataccggtcaagaaaccggcaaagtggactgccgagacgccgtacctttattccgtcgagctgtcaatcaccacggcctccggcacacaaacgattcaccagagagtaggattccgcaaggtcgaactgaagaacggcttgatctgtgtcaacggccggcccatcaggctccgcggggtaaaccgacacgaccaccatccgcgtttcgggcgtgccgttcccctcgactttgtccggagagacttgctcctgatgaagacgcacaacatcaacgccctccggtgcagtcactaccccagtgaccctaggctgttcgatattgcagacgagctcggattatgggtgattgacgaggcggacctcgagtgccacgggttctacgacgccgttgcgcgccccaaggacatcccggaggagatggactacgaggagcgcaagaagctgacctttgcagaagcagccaaatacaccagcgacaacccatcgtggaaggccgcctacgtcgatcggatggagcagatggtgcatcgcgacaagaaccacccctccgtcatcatctggtctctcggcaacgaggccttctacggccagaaccacaaggccatgtacgaatacgcaaaggaggttgaccccgggcgcctggtccactacgagggcgatgtgcatgccgagtccgccgacatgttctcgtacatgtacccctctgttgagcgtctgatcaagctggccaagaccgagggtgtcagaccagatggcacttttgacaagcccgtggtcctttgcgaatacgcacatgcgatgggcaacggacccgggtggctagaagattacgaggaggcgttccgttcctatccccgcctccagggcggattcgtctgggagtgggcaaatcacggcttgtggaaagagaatccagacggcaagtcgtactacgcttacgggggcgactttggtgacttcccaaacgatggcacgttcgtcatggacggcctcttgcacagcacccaccagccaacgccgggtttgatcgagctcaaaaaggtgattgaacccgtaaaggtcaagatagatcgagaccagcttgtcgtgtcgaacctctacaactttgtcggcctcgatcatctcactgcaacttacaaagtagagcagttttccgaaagcaccacccttctagcgtctggagtgttggatctccccaagatcgagccaggctccagcgccccggtcgcccttccgagcgcagtacataagttcgagggtgaggcaggtgccgagacacatctgaccgtctccttcacccttgcaaccgcaacaccgtgggccgaggcgggacacgaggttgcctggtttcaacaccaacttcaagcggccgagccgctcaaatcggcaggtcagcttcgcgcatctaaggcccttgacctggcgatatccaacagtgccatcaccgtcaccggcccaagtttccaactttccttcgacaaagcccgtggctacatcacgcactggtccgtcaacaacaccccgcttctcgagccggacccggtcaccggcgcggccatcataccctctttctggcgcccgccgacggacaacgacaatccctcctccctcccttactggcgccgcttcggcgtagacgtcctcacatcccaactccgctccaccaacctgtccacggaagcctcggccggccgcatccacgacaaggacagcggcaacaatgtcgaactgactttcaccacctaccacgccccgccggtccttgactggggctacctcgccacgacaacctacaccatctccccgcgcgggaccctctccgtcgccgtccgcctccggctggcaggatcctatccgcccgagcacgtcccgcgcgtcgggctggacctccgcctgccccgccgcctggacagcgtcaagtggttaggcctcgggccgggggagtcgtacccggacaagtgctccgcgcagcgggtcggggtgtggacggccgagtcggtggacgcgctgcagacgccgtacgaggtgccgcaggagggcggcaaccggatgggcacgcggtgggtgacgctgcgggagcgcggccccgccggggttgggttgcgcgtgacgaaggcggagggggagtggtcgggcaattgcgagagcgagcctgccgcctccgcgggagggttcagcttccgcgctggccggtacagggacgcggtcgtcgcggctgccaagcacccttgcgacctggttccggaggacgctaccctgctgaggctggacgccagggtggccggggtgggcacgggggcgtgcgggccgggggtgagggaggatttgctggtccctgtggaggattacgagtttggctttctcttggagccagtcgatggttga

SEQ ID NO: 354 - protein, 1080 aa, Myceliophthora thermophilia
MQIKGITLQQDEIKPDYANEAVFRRNTLPPRSYYIPKTSLALNGRWNFHYTSTPLKAPVPSSGTQASPTPSASDHPDETWTAIEVPGHWQLQGHGIPHYTNVQYPIPVCPPYVPTENPTGTYKRTFHVPSSWDRASQLRLRFDGVDSAYHVWVNGTLIGYAQGSRNPHEFDVTPYVNRDGANEVWVRVYQWSDGSYIEDQDQWWLSGIYRDVHLISLPSETRIEDWFLRTDLDAEYSDGTLDATIDVVTSTTATVSVALRELAKNGGETLGDAQQEVNGDGKVHLTIPVKKPAKWTAETPYLYSVELSITTASGTQTIHQRVGFRKVELKNGLICVNGRPIRLRGVNRHDHHPRFGRAVPLDFVRRDLLLMKTHNINALRCSHYPSDPRLFDIADELGLWVIDEADLECHGFYDAVARPKDIPEEMDYEERKKLTFAEAAKYTSDNPSWKAAYVDRMEQMVHRDKNHPSVIIWSLGNEAFYGQNHKAMYEYAKEVDPGRLVHYEGDVHAESADMFSYMYPSVERLIKLAKTEGVRPDGTFDKPVVLCEYAHAMGNGPGWLEDYEEAFRSYPRLQGGFVWEWANHGLWKENPDGKSYYAYGGDFGDFPNDGTFVMDGLLHSTHQPTPGLIELKKVIEPVKVKIDRDQLVVSNLYNFVGLDHLTATYKVEQFSESTTLLASGVLDLPKIEPGSSAPVALPSAVHKFEGEAGAETHLTVSFTLATATPWAEAGHEVAWFQHQLQAAEPLKSAGQLRASKALDLAISNSAITVTGPSFQLSFDKARGYITHWSVNNTPLLEPDPVTGAAIIPSFWRPPTDNDNPSSLPYWRRFGVDVLTSQLRSTNLSTEASAGRIHDKDSGNNVELTFTTYHAPPVLDWGYLATTTYTISPRGTLSVAVRLRLAGSYPPEHVPRVGLDLRLPRRLDSVKWLGLGPGESYPDKCSAQRVGVWTAESVDALQTPYEVPQEGGNRMGTRWVTLRERGPAGVGLRVTKAEGEWSGNCESEPAASAGGFSFRAGRYRDAVVAAAKHPCDLVPEDATLLRLDARVAGVGTGACGPGVREDLLVPVEDYEFGFLLEPVDG

SEQ ID NO: 355 - DNA, 1239 bp, Myceliophthora thermophilia
  CDS (1)...(1239)
atgtacggtacagcagccccgttggcgcccgtgtcggtgcaggacgcgcccaagttcccccaccgcggcgtcctgatcgacacggcgcgcaacttcctccccgtcgccgacatcctgcgcaccatcgacgccatggcctggagcaagctgaaccggctgcacgtccacgtgaccgactcccagtcgtggccgctcgtgatcccctcattgcccgaggtctcggagaagggcgcctaccacccgagccagacgtactcgcccgaggatgtcgagaagatccagacgtacggcgccgagcggggcgtcgaggtgtactttgagatcgacatgccgggccacatcggggtggtgtcgctgtcgcacccggagctgatcgtggcctacaatctgcagccctaccagtggtggtgccaggagccgccgtgcggcgccttcaagctcaacaataccgcggtcgacgcgttcctggacaagctgttcgacgacctcctgccgcggctggcgccgtactcggcctacttccacacgggcggcgacgagctcaaccggaacgactcgatgctggacgagggcatccggtccaacgacaccgaggtgctgcggccgctgctgcaaaagttcatcgacaagcagcacgcgcgcgtccgcgcggccggcctgaccccgatcacctgggaggagatcccgctcgagtgggaagtcgacatggccaaggacacggtcgtgcaatcgtggctgggcggcgacgcggtcaagacgctgaccagcaagggctatcaggtgattgacagcaactacaacttctggtacctcgactgcggccgaggccagtggctgacgtgggggaacggggcggcgttcgcccagggctacccgttcaacgactggtgcgggccgaccaagtcatggcagctagtgtaccagcacgacccgacggccgggctgacggccgaggaggccaagctcgtgctgggcggcgaggtggcactctgggccgagaccatcgacccggtcaacctggacacgctcgcctggccgcgcgccagcgccgtcggcgaggccctctggtccggccggatcgacccggcgacgggccagaaccggagcctggtcgaggccgccccgcggctcaacgagttccgcgagaggctggtcgccaggggagtcggggcctcgcccatccagatgaccttctgcacccagggaagggccgaggagtgcgagtttatcgtcgcttga

SEQ ID NO: 356 - protein, 412 aa, Myceliophthora thermophilia
MYGTAAPLAPVSVQDAPKFPHRGVLIDTARNFLPVADILRTIDAMAWSKLNRLHVHVTDSQSWPLVIPSLPEVSEKGAYHPSQTYSPEDVEKIQTYGAERGVEVYFEIDMPGHIGVVSLSHPELIVAYNLQPYQWWCQEPPCGAFKLNNTAVDAFLDKLFDDLLPRLAPYSAYFHTGGDELNRNDSMLDEGIRSNDTEVLRPLLQKFIDKQHARVRAAGLTPITWEEIPLEWEVDMAKDTVVQSWLGGDAVKTLTSKGYQVIDSNYNFWYLDCGRGQWLTWGNGAAFAQGYPFNDWCGPTKSWQLVYQHDPTAGLTAEEAKLVLGGEVALWAETIDPVNLDTLAWPRASAVGEALWSGRIDPATGQNRSLVEAAPRLNEFRERLVARGVGASPIQMTFCTQGRAEECEFIVA

SEQ ID NO: 357 - DNA, 1251 bp, Myceliophthora thermophilia
  CDS (1)...(1251)
atggagaagagcagcagccacggcggtggctctgctgagcagatcaacatttgctcagacctggtcggcatgcaacccattaacatcaattgcccggccgacacggcactgggcatgacgatacacgtcgacttcaccgagggggaggtcaactccttcgtccctagcgggggggtgccgacctacgacgaggacggcgtcagcttcacggtcgcctcttccggcgacgcgccgcagctgacgagcatcttctacatcatgttcggccgcgtcgaggtgaccatgaaggccgcccccggcgccggcatcgtcagctccctcgtgctgctctccgacgccctcgacgagatcgacatggagtggctgggcgccgactcgaccgaggtccagaccaactacttcagcaagggccagaccaccacctacaaccgcggccagttcaacccggccccgaacaaccaggccgagttcgtcacctacaccatcgactggaccgccgaccgcatcgcctggtacgtcggcggcaccctcgtccgcaccctcaccttcgacgaggccaacggcgagtacccgcagacgccgatgcaggtcaagttcggcgcctggtccggcggcgacccgtccaacccgcccggcaccatcgagtgggcccgcggcccgaccgactactcccaggggcccttctccatggtcgtccgctccgccgtcgtgaccgactactccaccggcaagcgctacacctacggcgaccagtcgggcacctggcagtccatccgctccgacggcggcgagatcaacggcaacctgggcgccgccggcaccgtctccgtcaccgccagcgcccccgccgccaccgactccctctcccccaccatcccgcccggcggcatcatcggcggcggcaccgccaccgccaccgacgggagcaccggcccctcccgcaccgtcggccccatcccggacggctgggtcatgacatccgagggcaaggtcgtgcccattgggtcgagcactacactccccggagcacaaccgtcctcctccctctcgcgggagctctctgcttcgccctcaacggcgggctccggcggcggtgagaccaccaccctcgccacgagcacactatcgacccttggcggcgcgagggcgccgactgacgcgccccctgagagcagcgcatcgaccgcgagacgaggcggacttctgcttggactcctcgtcctcgccgcgtccgcgttgctttgctggtag

SEQ ID NO: 358 - protein, 416 aa, Myceliophthora thermophilia
MEKSSSHGGGSAEQINICSDLVGMQPININCPADTALGMTIHVDFTEGEVNSFVPSGGVPTYDEDGVSFTVASSGDAPQLTSIFYIMFGRVEVTMKAAPGAGIVSSLVLLSDALDEIDMEWLGADSTEVQTNYFSKGQTTTYNRGQFNPAPNNQAEFVTYTIDWTADRIAWYVGGTLVRTLTFDEANGEYPQTPMQVKFGAWSGGDPSNPPGTIEWARGPTDYSQGPFSMVVRSAVVTDYSTGKRYTYGDQSGTWQSIRSDGGEINGNLGAAGTVSVTASAPAATDSLSPTIPPGGIIGGGTATATDGSTGPSRTVGPIPDGWVMTSEGKVVPIGSSTTLPGAQPSSSLSRELSASPSTAGSGGGETTTLATSTLSTLGGARAPTDAPPESSASTARRGGLLLGLLVLAASALLCW

SEQ ID NO: 359 - DNA, 3342 bp, Myceliophthora thermophilia
  CDS (1)...(3342)
atgacttgccgcgagttggccgcctccgatggctccggcaccagcaggcccggcccggccctcaatgacctcccttgtccccggatgcaggcccgggtccgtcgtcgatgcacatggctcggcttgcacaactcgaccctctggctgggatgcatgctcctggcgctctgcgtgggctattggcccgtggcagcggccatgcgtccggaccgcgtgcgggagctccggcaggaaaccgtcaacatgttttaccacggttttgacaactacatgaagatagccttcccggaagatgagctccgaccggtctcttgctccccgctcacccgggatagggagaacccgcggaatgtcgagctgaatgatgttttgggcaactactcgctcaccctcatcgacagcctctccaccctggccatccttgcctcggccccccccgaggacggcgagaccggcccgaaggcgctgagggacttccaggatggcgtggcagccctggtcgaacagtacggagacggcacctccggcccctctggtgtcggccttcgcggccgcggcttcgacgtcgacagcaaggtgcaggtgttcgaaacggtcatacgcggcgtcgggggcctcctgagcgcccacctgtttgccattggcgccttgccgattacgggctacaatccccggcaccccggagacgacctgctgcacccgaggcctgtcgtctggcccaacgggttcagatacgatggccaactgctgaggctcgctctggacctgggccagaggcttctccccgctttctacaccaggaccgacatgccgtatccccgcgtcaacctccgccacggcatcccgttctacaccaactcgcccctccacgaggccgctgcaccggggaccaccgccgatgggtcccccgagatcaccgaaacgtgcagcgctggtgccggatccttggtcctggagttcaccgttctcagccgccttaccggtgacccccgctttgagcagctggccaaaagggcgttctgggccgtctggtacagaaagagccagataggtctgattggtgccggagtggatgccgagcaggggcattggataggttcctacgccgtaatcggtgctggcgctgacagcttcttcgagtatgccctcaaatcccacatcttgctctctggccacgagctcccgaatcaaacagcagtccgccctgatcgcgccagcgacggatggttggatccaaacaccctgttcaatcccctcagtgatgccgagaactcccccgactccttcctcgaagcctggcatcacgcacacgcatccatcaagcgccacctctacagcgaccgtgaccatcctcactatgagaacgtcaacctgtggaccggctccctagcgtcctcctgggtagacagcctcggcgcctactattcggggctcctcgtcctcgccggcgaggtgagcgaggcgatcgagacgaacctgctctacgctgccatctggacccgctacgccgcactcccggaacgatggtccatccgcgagaagacggtggaaggcggcctcggatggtggccgctaaggccggagtttatcgagtctacctaccacttataccgcgctaccaaagacccctggtacctctatgtcggcgagatggtgctccgagacatcgcgagacggtgttggaccccttgcggctgggcggggctccagaacgtcttggacgggcaaaagagcgaccgcatggaaagcttcttcctcggtgaaactgccaagtacatgtacctgctctacgacgaccaacacccactaaactcgctcgacgccgcgtacgttttcaacaccgagggccaccccctaatcatacccaaggccgcgtcggcaagtggacgccgacgaccgcgagccgaacgcaaggatctggccatctacaacgacgacgccttcaccaactcatgcccccctcgtccctccgcgactcccatctctggttctgttatcgccgccagggatgacatctaccacgccgcacggatgctggacctacatctgctgtccacttcgccacgcaccgtcgacggcgggcagatgtccggccagcacatggcgagatcaaatttcactctgtttccgtggaccctcccatccgaactgctccctagcaacgggacttgcgccaaagtacaccacccgacagagctcgtcctcgagtttgcctcgaacgcgggacagatggtgggcggcggtgcgttcaactttatgatcggcgcccaaaatctggaacgtttgagtgcggatcggatccgcgtcaccagcctgtctggtctgaagctcacgatgcatctcgagggggacttggagcaagagtggcgcgttacaaaagtcaacggcatccccctgggccgcgacgagttcctcgtatttgaccggtccatcctgggggaggtctctgaccccagattcaacctcgtccgagacccggtgatggtcaagctccagcacctccaccaagtcgacatcccagaggacgatgccgacaccgtcgacgatgacgcgccacaagccagcaaccacgaacccggacccgaacccgaaccgctcgaggacggaccgaacccctccgtcaccgtcacggacctcggctcccttgtcaaatccctcctcagccgcatcacctcttccctcgacaacatccagctacccacctccctaccacgcatcggcgccaccctcctccccttcaacctcgttctcaacacaacagccataacctcaaccggcatcggttccgcccctctccctcccggtgcctccccgccttcggccgcccaacggcaccggaccccgcccttcggccccgtccccgatgccctcttcccctggtcaaccatctacgcctcgccggacgacgcctgctcctctccgctaccggatgctgccccccgcgaccaccagatcatcctcatccgccgcggcggctgcagcttctcgaccaagctggccaacatcccggcattcacgccgtccccggactcgctccagctcgtgattgtcgtgtcggacgacggcgacgacgctgaccaggacaaccgcggaggtggtggtggcggcggcggggttgccgggctcgtgcggccgctgctggacgaggtgcagcgcacgccgggcggcatccagcggcggcatccgatcgccatggtcatggtgggcggtggggaggccgtgttccgacagctggaggcggcgagccgcgtcggggtggtgcggcggtactttgtcgagagccagggggtgaagataaggaacatcattgtcgacgaaggcggcgacgagatggactggtga

SEQ ID NO: 360 - protein, 1113 aa, Myceliophthora thermophilia
MTCRELAASDGSGTSRPGPALNDLPCPRMQARVRRRCTWLGLHNSTLWLGCMLLALCVGYWPVAAAMRPDRVRELRQETVNMFYHGFDNYMKIAFPEDELRPVSCSPLTRDRENPRNVELNDVLGNYSLTLIDSLSTLAILASAPPEDGETGPKALRDFQDGVAALVEQYGDGTSGPSGVGLRGRGFDVDSKVQVFETVIRGVGGLLSAHLFAIGALPITGYNPRHPGDDLLHPRPVVWPNGFRYDGQLLRLALDLGQRLLPAFYTRTDMPYPRVNLRHGIPFYTNSPLHEAAAPGTTADGSPEITETCSAGAGSLVLEFTVLSRLTGDPRFEQLAKRAFWAVWYRKSQIGLIGAGVDAEQGHWIGSYAVIGAGADSFFEYALKSHILLSGHELPNQTAVRPDRASDGWLDPNTLFNPLSDAENSPDSFLEAWHHAHASIKRHLYSDRDHPHYENVNLWTGSLASSWVDSLGAYYSGLLVLAGEVSEAIETNLLYAAIWTRYAALPERWSIREKTVEGGLGWWPLRPEFIESTYHLYRATKDPWYLYVGEMVLRDIARRCWTPCGWAGLQNVLDGQKSDRMESFFLGETAKYMYLLYDDQHPLNSLDAAYVFNTEGHPLIIPKAASASGRRRPRAERKDLAIYNDDAFTNSCPPRPSATPISGSVIAARDDIYHAARMLDLHLLSTSPRTVDGGQMSGQHMARSNFTLFPWTLPSELLPSNGTCAKVHHPTELVLEFASNAGQMVGGGAFNFMIGAQNLERLSADRIRVTSLSGLKLTMHLEGDLEQEWRVTKVNGIPLGRDEFLVFDRSILGEVSDPRFNLVRDPVMVKLQHLHQVDIPEDDADTVDDDAPQASNHEPGPEPEPLEDGPNPSVTVTDLGSLVKSLLSRITSSLDNIQLPTSLPRIGATLLPFNLVLNTTAITSTGIGSAPLPPGASPPSAAQRHRTPPFGPVPDALFPWSTIYASPDDACSSPLPDAAPRDHQIILIRRGGCSFSTKLANIPAFTPSPDSLQLVIVVSDDGDDADQDNRGGGGGGGGVAGLVRPLLDEVQRTPGGIQRRHPIAMVMVGGGEAVFRQLEAASRVGVVRRYFVESQGVKIRNIIVDEGGDEMDW

SEQ ID NO: 361 - DNA, 3255 bp, Myceliophthora thermophilia
  CDS (1)...(3255)
atgggtggcgagacaccgtcccagaggggtcctcggagcgactatcccctccaagccccaaagcccgtgggccaactgatttccaacatctacaaagaccgcatcagtcagttctactcgggcggccaatatgagcaccagaacctccttgccatgatgaaagaggccgtcgtctctggcgagccccatgtgcagctttccgtgtggcatgctccggaccagactcgcccgaccttcaagaacgctacgtcccacaagttcacaaagacgagcgtcggcgagtggtttggcccctcgtggacgacccactggttcagggtcatcttgaaggtcccagaggagctccgggacaagaggctcctcgagtttcattgggacgccaacaatgaggggatggtgtggaacgaggacggccacccgctccagggcctcacaggcggcggcgagcgtgtcgagtggatcctcccggactcgttccgcgacggcaaggagcacaccatctacatcgaaatggcctgcaacggcatgtttggcaatgccccgggaggggactcgatccagccaccagacccgaacaagtactaccgccttgaccgagccgagattgttgccgtcgatccggatgcacgccagctgtacatcgacatctggatcatcggcgacgctgcgagggagtttccccaggactcgtgggagcagcacaaggcgctcaagacctgcaacgagatcgtcgacgccttcgagatcggaaacagggagtcgctcaagacctgccggaggattgccgagcaatacctcgggcccaacgtcaactcggccaaggtgtacgagagcggcaaagaacccgtcgttttcggcatcggacactgccacatcgacagctgctggctgtggccctttgccgagaccaaacggaaggtggccaggtcgtggtccagccagtgcgacctgatggaccggtaccccgagctcaactttgcctgctcccaggcccagcagtacaagtggctcaaggagctgtacccttccgtctttgaccgggtcaagaggaaggtcgacgagggccgcttccaccccatcggaggcagctgggtcgagcacgacaccaacatgccgagcggcgagtcgctggtccgtcagttcttgtacggccagcgcttctacgagagcaactttgggaaacgctgccagaccttctggttgcccgacacgttcggttattcgagccagctgccgcagctctgccgtctggccggcatgacgcgcttcctcacgcagaagctcagctggaataacatcaaccgcttcccccacaccaccttcaactgggttgccttggacggcacccaggtcatctgccacatgcctcccgccgagacgtacacggccgaagcccacttcggcgacgtcaagcgcagcatgtcgcagcacaagtcgctagaccaggacgccacatccctgctcgtatttggcaagggagacggcggcggcggccctacctggcagcagatcgagaagctgcgtcgctgccgtggcatcagcgacactgtcggcctactgccccgagtacacatgggcgagtcagtcgacgacttcttcgacaggatcgaacgcaaggcagactccctcgtaacatggtacggcgagctgtatttcgaactgcaccgcggcacgtacacgacccaggccaagaataaacgcgacaatcgcaggtccgaggttgtgcttcgagacctggagctgctagccaccattgcgtccatcaaagacaagtcctacaagtacccgaagaaggagtttgatgacatgtgggagctggtgcttctctgccagttccacgactgccttccggggagctcgatcgagatggcctaccgggaatccgacgagatgtatgcccaggtcttcaagaccgccgagagcgccttgaaggatatttccaaggtgctaggtttctcccaggtgcagaccaccacggtcgcagacggtctcgctctcaacacgctaccatggcatcgcaaggaggttgtcgatatttctgaaaacgaggccgctgtcgcgtgcggcaatggcccgctgctgaagctgcggactttgaagacgagccaagacaagcccctcgtcacccttcagcaaccctcgaagagtgtttttgtccttgagaatgatcaactcagggtcagggtagaagcgggtgttatcacgtcgctctacgatcgaaccgccgagcgcgagatcatccccaagggccagaaggctaaccaatacgtcatctttgacgacaagcccctctactggcaggcttgggacgtcgaggtctaccacctcgacactcgcaaacctcttcagcctggcgagaccagagtccacgaaatcaagaaccaccgcgttagcgtcgtcacccggaccaagatcagcgacgagtcctccatcgaaaccatcatcagtctcaccgccgccctcccgggccaacaatcccacgttgagatctccagcaccgtcgagtggcatgaaacgatgaagttcctcaaggtcgagttccccgtcgacatccgcaacacggaagcgtcgtacgagacgcagtttggtatcgtccggcgcccgacccactataacacctcgtgggacatggccaagttcgaggtctgctcgcaccgcttcgccgacctctcggagcacggctacggcgtgtccatcctcaacgactccaagtacggcttcgccaccgccggcaacgtcatgcgcctgtcgctgctgcgcagccccaaggcccccgacgcccacgccgacatgggcacccaccacatccgctgggccatcctcccccaccagggcgccctgtcgcacgtcaccgtccgcaaagccgccgagttcaacagtccgctcaagctcgctgcccccgccggcgccggcgccggcgccgccttggcggacctgtcctcgccgcccgtgtatctgacgcccgactcgagcgaggccctggtgctggacacagtcaagcgcggcgaggacgacgaggacgtctcgcgcggggagctgccagtcaagaagggccggagcgtcatcctgcgcatctacgacagcctcggcggtcgggcccggggcaccgtggccaccacctgggatgtcgcgaaggtgtacaaggtcaacctgctggaagacgagctggaggaggtggtactggctgaggggggccggtttgccgtggacctgaggccctttgaagttgccagttacaagttgcagctggcgtag

SEQ ID NO: 362 - protein, 1084 aa, Myceliophthora thermophilia
MGGETPSQRGPRSDYPLQAPKPVGQLISNIYKDRISQFYSGGQYEHQNLLAMMKEAVVSGEPHVQLSVWHAPDQTRPTFKNATSHKFTKTSVGEWFGPSWTTHWFRVILKVPEELRDKRLLEFHWDANNEGMVWNEDGHPLQGLTGGGERVEWILPDSFRDGKEHTIYIEMACNGMFGNAPGGDSIQPPDPNKYYRLDRAEIVAVDPDARQLYIDIWIIGDAAREFPQDSWEQHKALKTCNEIVDAFEIGNRESLKTCRRIAEQYLGPNVNSAKVYESGKEPVVFGIGHCHIDSCWLWPFAETKRKVARSWSSQCDLMDRYPELNFACSQAQQYKWLKELYPSVFDRVKRKVDEGRFHPIGGSWVEHDTNMPSGESLVRQFLYGQRFYESNFGKRCQTFWLPDTFGYSSQLPQLCRLAGMTRFLTQKLSWNNINRFPHTTFNWVALDGTQVICHMPPAETYTAEAHFGDVKRSMSQHKSLDQDATSLLVFGKGDGGGGPTWQQIEKLRRCRGISDTVGLLPRVHMGESVDDFFDRIERKADSLVTWYGELYFELHRGTYTTQAKNKRDNRRSEVVLRDLELLATIASIKDKSYKYPKKEFDDMWELVLLCQFHDCLPGSSIEMAYRESDEMYAQVFKTAESALKDISKVLGFSQVQTTTVADGLALNTLPWHRKEVVDISENEAAVACGNGPLLKLRTLKTSQDKPLVTLQQPSKSVFVLENDQLRVRVEAGVITSLYDRTAEREIIPKGQKANQYVIFDDKPLYWQAWDVEVYHLDTRKPLQPGETRVHEIKNHRVSVVTRTKISDESSIETIISLTAALPGQQSHVEISSTVEWHETMKFLKVEFPVDIRNTEASYETQFGIVRRPTHYNTSWDMAKFEVCSHRFADLSEHGYGVSILNDSKYGFATAGNVMRLSLLRSPKAPDAHADMGTHHIRWAILPHQGALSHVTVRKAAEFNSPLKLAAPAGAGAGAALADLSSPPVYLTPDSSEALVLDTVKRGEDDEDVSRGELPVKKGRSVILRIYDSLGGRARGTVATTWDVAKVYKVNLLEDELEEVVLAEGGRFAVDLRPFEVASYKLQLA

SEQ ID NO: 363 - DNA, 1122 bp, Myceliophthora thermophilia
  CDS (1)...(1122)
atgtcggactggggaggcgtcaactccaccgtcgaatcgatcaaggccggatgcgacattgagttcccgtactctgacaagtggcgcttcggcaaggttcttgacgccctcaaggaagggaagattgccgaggccgatatcgaccgggcagccgagaacgtgctcactctggtcgagcggaccaagggcagcgacctgacggccgaggccgaggaaagagaggacgaccgcgaagagacgaggaatctcatccgcgaagcgggcgtgcaggggctcaccctcctgaagaacgaggggtccatcctgcccatcgacccggccacggccaaggttgccgtgatcgggcccaatgccaacagggcgatcgcgggaggcggcgggagcgccagcctcaacccgtactacaccacgctgcccctggacagcatccgcaaggttgccaagcagccggtcagctacagccaggggtgccacatccacaagtggcttcctgttgcgtccccctactgctccgacaagacggggaagcagggggtgtcgatcgagtggttcaagggcgacaagttcgagggccagccggtcgtgttccagcggcggaccaacaccgacctcttcctgtgggactcggccccgctcgcccaggtcggcccgcaatggtcggccatcgtgacgacctacctgacgcccccgagcacgggcaagcacaccatctcgttcatgacggtcgggccgggcaggctctacgtcaacgggcagctcgcgctggacctctggaactggaccgaggagggcgaggccatgttcgacggctcgatcgactacctcgtcgacgtcgagatgcaggcgggccggccggtggagctccgggtcgagatcaccaacgagctgcgcccgatcgccaagcagaagcagttcgacatgacgcacaagtacggcggctgccggatcgggttcaagcccgaggacaaggtcgactacctgcaggaggccgtcgatgcggccaaggcggccgacgtcgccgtggtcatcgtcggcctggacgccgagtgggagtcggagggctacgaccgcaagagcatggacctgccctcggacgggagccaggactgcctcgtcgaggcc

SEQ ID NO: 364 - protein, 374 aa, Myceliophthora thermophilia
MSDWGGVNSTVESIKAGCDIEFPYSDKWRFGKVLDALKEGKIAEADIDRAAENVLTLVERTKGSDLTAEAEEREDDREETRNLIREAGVQGLTLLKNEGSILPIDPATAKVAVIGPNANRAIAGGGGSASLNPYYTTLPLDSIRKVAKQPVSYSQGCHIHKWLPVASPYCSDKTGKQGVSIEWFKGDKFEGQPVVFQRRTNTDLFLWDSAPLAQVGPQWSAIVTTYLTPPSTGKHTISFMTVGPGRLYVNGQLALDLWNWTEEGEAMFDGSIDYLVDVEMQAGRPVELRVEITNELRPIAKQKQFDMTHKYGGCRIGFKPEDKVDYLQEAVDAAKAADVAVVIVGLDAEWESEGYDRKSMDLPSDGSQDCLVEA

SEQ ID NO: 365 - DNA, 4407 bp, Myceliophthora thermophilia
  CDS (1)...(4407)
atggtggcttcttcatggttcaccgcgccgcttgtggctgttgccctcctgctctctctcgatggagctgtggcgaagaagccaacattcaggcctccctccctcccaacgtacgacgatgatgcggcttgcccagagcgatgcagcgtttccgggcccagtacggggaactggtccgtttatcccaacttcgagcccataaggaagtgcacgcagaccatgttttacgacttctctctctacgactcggtcgacgacccgactgtcaaccaccggattcatgcttgttcatctttcggtcctgatttctccatcatccccggctccattaccaaaactgcttacgcctcgcctgcgcccgccaagatccggttcgagcttggatggtggaaccggggctacggcctggctgcccccggtctccggtccttggtaaagcaactccgcgcctacatcgatcacggacacggcgacggcgccgcggacaggcctttcatcatatacggccagtctggtcaagccaccatcggtctctatattggccagggtctgctgagccagggccttagcaagtctgcactcaagattctccaagacaatctcgcgaactcggacgtctcagcaccgagcctggccatacagctctgtggccagggctacggtagtagccatatctttggggctatggtcaccagcaatggaaccttcgctcccatccaagaggctatcaggacatgggccaatgccacgtgcctgtccttcgccggatccaaggagttccccggcgaggtcatgtttactacgccgctcttgctcgccaatggcaccgccaactcgaccgtccgggctcggtccctccgcccctatgcggctgagtgtcggacagtgcaggtcgaggccggtgacagctgtgggacactggccaagaaatgtggcatctctggtgccgacttcaccaactacaaccctggagcgagcttctgctccacgttgaagccgaaacagcacgtgtgctgctcgagcggaacgcttccagactttcgccctgtcaccaacccggacggctcatgctactcatacaaggtcaagagcaatgacaactgcgctgacctcgccgccgagtacggtcttacggtcgacgaaattgagagcttcaacaagaacacctggggctggggcggctgtaaggtcctattccttgacaccatcatgtgccttagcaaaggggctccgccattcccagctccgatctccaacgctatctgcggtccgcagaagctcggcaccatcccgccaacggacggctccaatatcgcagaccttaacccctgtccgatcaatgcctgttgcaacatctggggccagtgtggcatctccaaggacttctgcatcgacacgaacactgggcccccggggacggctgcccccggtacctacggctgtatctccaactgcggcctcgatatcgtcaagggaaaggggaccggctccatcaaaatcgcctactttgaaggcttcggcctggaacgagagtgtcttttccgggacgcctcccagatcgatacgtccaaatacacacacgtccacttcgccttcggcacgttgaccccgacctatgaggttaacgttggcgatatactgtcctcgtaccaattcacccaattcaagcttatctctgggcctaagaagatcctatcgtttgggggctgggacttttcgacctcaaaggcgacttattccatcttccgtaacggcgttaaggccgagaaccgtctcaccatggctaaaagcatcgccaatttcatcaaggaacacgacctcgacggcgtcgacattgactgggaatatccaggagcgcctgatatccccgatatccctgcgggcgaagaggacgagggaaccaactacctggcctttcttgtcgtcctaaagaacctgcttcctggaaagagcatctccattgccgcaccgtcgtcgtattggtacttgaagcagttccccatcaaggccatcagtcggattgtggactatatcgtcttcatgtcctacgacatccacggccagtgggatgcccacaacatgtggtcccaggacggatgcgttacaggcaactgtctacggagccatgtcaacctgacggagactaggctggcgttggttatgattactaaggcaggtgtccctggcgagaaggtcattgttggtgtgactagctacggccggtcctttgacatggctcaacccggctgctggagccccgactgtcagtttacgggggaccgtctgaactcgaacgcaaaaccggggaggtgtaccggtacggccggatacatttccaacgccgagattgacgagatcttggccggcgggggatcgagcgggggatcgagccaggcgcgtgcgggacgagtcgtcgcgagctttgttgataccagtagtaatacggatgtgctggtctacgacaacaaccaatgggtcggctatatgagcgaaaagaccaagaaaacccgtacgaccctctatacgggttggggcttgggaggtacgaccgactgggccagcgatttacagcaataccacgacgtccccgggccggcaaaggactggacagagtttaagcaactcatccgcgccggagaggacccgaagtccgaccactcacgcgaaggcgactggactaagttcgactgtacgaacccgtacttggtcgataaaacattctacacgcctactcagcgctggaagaacttggatacggatgctgcgtggcgcgacgttgttaggatctggaaagagaccgataaaccccgcaatatcatgtttacggcctcagtctcgactacgcttcacatctcggccgacgtcgactgcagaaacctagaggattgcaacacgaccgaagagtgctcagcgggcctcaacgggccgtactctggtcctgccgcgcagttcatctggaactcgatggtaaagatccatgccatgtaccacaactacgttctgatgctcgaaagggccacctctctcgttagcatggcactcgacgacatgcaaaaaacattcgcgccggttccggtggaggaagataaggcgtggctctacctcctcatcgacctcatcacccttggcacccttactgttgcggggcccttgtacaacaggcaactggggatgtatgtctatttctccgacaagtctgtcgacgacatcaaggacaccaccatgaccctgattggacaaagcacgaccatcgccaaggatgtgttgtcgaccaagcaagaagcatggactgagaacttgcaggctagcttcaacaatatgttgagccgggtcattgaaggttggcagaatgccacatctctcgccgtcaatgagatattcagcggcagtgaaacgtccctcaacattctttgggacgtcatgtcggatggaaaactcatcgagggcatgccgccaccgggaagcgggcccccccccgaccccggaaacatccataacgagctccaagccaacgtgaaaaagtcgatttatgctttcgccatccccaacctctggcgcgtatcgcagacgtttgccttcatcctcgactcgggtttcgggtgcgacgtcgagaagccgctgcaggactacctcgaggacgagaccatggaggccacaggcgcctgcgtcgacggaaagcggtactacctggttgccccgatcggcgagtccaggacatgcgactgggtgaacggaatgtgggattgcacactttccaacaagttctcggcgcctccgggactggacaggctcggcgccgacttcggctatctcaccaaggaggacttcatcaagggttccatccgcacgtggctcaagaacggcaaacggaatgccggcggcggcatgccggacgtgaccgacatcgataccatcaacagccttatcgacctcgatttcaccacgccgggcttcatccacctccccgtctgcagccccgagcgggcgtaccagacgtgggacacgagctcctcgggctatggcgccaactacccgtgcgaccccccgccgggtatcaacaactgcggcgattcgacctttgaggatcagaccagcgccgcgtcgcctaaggtcgaggattgcctgcagatcatcaagaacatccaggacgacggtaagaccgagtggaccatccaggttctgggcaagaaccagcgcgagattgccaagtttggggagtgccgcttcggcgtcgaggcgaccgagcagaccggcaacgccgacttcaaggtcggcggccaggacgtcatcgacatcatcaacgacgccgtcgagaagttcggcgggagcggtagggtcggcgccaagggagacatgtcgtgcaacggcaacatcaaggggcaggctgtcaaatggggtatctactaa

SEQ ID NO: 366 - protein, 1468 aa, Myceliophthora thermophilia
MVASSWFTAPLVAVALLLSLDGAVAKKPTFRPPSLPTYDDDAACPERCSVSGPSTGNWSVYPNFEPIRKCTQTMFYDFSLYDSVDDPTVNHRIHACSSFGPDFSIIPGSITKTAYASPAPAKIRFELGWWNRGYGLAAPGLRSLVKQLRAYIDHGHGDGAADRPFIIYGQSGQATIGLYIGQGLLSQGLSKSALKILQDNLANSDVSAPSLAIQLCGQGYGSSHIFGAMVTSNGTFAPIQEAIRTWANATCLSFAGSKEFPGEVMFTTPLLLANGTANSTVRARSLRPYAAECRTVQVEAGDSCGTLAKKCGISGADFTNYNPGASFCSTLKPKQHVCCSSGTLPDFRPVTNPDGSCYSYKVKSNDNCADLAAEYGLTVDEIESFNKNTWGWGGCKVLFLDTIMCLSKGAPPFPAPISNAICGPQKLGTIPPTDGSNIADLNPCPINACCNIWGQCGISKDFCIDTNTGPPGTAAPGTYGCISNCGLDIVKGKGTGSIKIAYFEGFGLERECLFRDASQIDTSKYTHVHFAFGTLTPTYEVNVGDILSSYQFTQFKLISGPKKILSFGGWDFSTSKATYSIFRNGVKAENRLTMAKSIANFIKEHDLDGVDIDWEYPGAPDIPDIPAGEEDEGTNYLAFLVVLKNLLPGKSISIAAPSSYWYLKQFPIKAISRIVDYIVFMSYDIHGQWDAHNMWSQDGCVTGNCLRSHVNLTETRLALVMITKAGVPGEKVIVGVTSYGRSFDMAQPGCWSPDCQFTGDRLNSNAKPGRCTGTAGYISNAEIDEILAGGGSSGGSSQARAGRVVASFVDTSSNTDVLVYDNNQWVGYMSEKTKKTRTTLYTGWGLGGTTDWASDLQQYHDVPGPAKDWTEFKQLIRAGEDPKSDHSREGDWTKFDCTNPYLVDKTFYTPTQRWKNLDTDAAWRDVVRIWKETDKPRNIMFTASVSTTLHISADVDCRNLEDCNTTEECSAGLNGPYSGPAAQFIWNSMVKIHAMYHNYVLMLERATSLVSMALDDMQKTFAPVPVEEDKAWLYLLIDLITLGTLTVAGPLYNRQLGMYVYFSDKSVDDIKDTTMTLIGQSTTIAKDVLSTKQEAWTENLQASFNNMLSRVIEGWQNATSLAVNEIFSGSETSLNILWDVMSDGKLIEGMPPPGSGPPPDPGNIHNELQANVKKSIYAFAIPNLWRVSQTFAFILDSGFGCDVEKPLQDYLEDETMEATGACVDGKRYYLVAPIGESRTCDWVNGMWDCTLSNKFSAPPGLDRLGADFGYLTKEDFIKGSIRTWLKNGKRNAGGGMPDVTDIDTINSLIDLDFTTPGFIHLPVCSPERAYQTWDTSSSGYGANYPCDPPPGINNCGDSTFEDQTSAASPKVEDCLQIIKNIQDDGKTEWTIQVLGKNQREIAKFGECRFGVEATEQTGNADFKVGGQDVIDIINDAVEKFGGSGRVGAKGDMSCNGNIKGQAVKWGIY

SEQ ID NO: 367 - DNA, 2439 bp, Myceliophthora thermophilia
  CDS (1)...(2439)
atggctttacccgtactcctcatcgcatgctggtcggcgctggcgggtcaagtactggcccgcaacacctttgatccgctcgcgtacgttgatccgctgatcggagccagcaacggcggcaatgtgttcccgggcgcctcgctgccgtacggcatggcgaaagcagtcgccgataccgacagcggcagccggcagggcggcttcactatggatggcgccgccgtcaccggcttcagcaccatgcacgacagcgggaccggagggaatccgagcttgggcaactttgcactcttcgcctacacaagctgccccggtggcgacatcaaccgatgtgccttccccaagaagacgcgtgctgcctttggacgcttccgcaatagcaatgtctcagcaaagcccggcacctttgacatcaccttgaacagcggcatccgagccgagatgacgacgactcatcacgcctcgctcttcaggtttaccttcccgagcgacggggctgatgaggagccagcccgacccctcatcttgcaggatctcacagatctggccgattctaggcaggataacgctacagtcgccgtggaccctaagacgggccgcatcaccggcagcgcccgcttcctgcccagctttggcgccggcacgtttgtcttgcacttctgcaccgacttcaagggcgccgaggtagcggacagcggcgtattcgtcaatagtcgggccagcaccgaggtccacaacctgaccatctcaagatccatcaatggctatcccctccccgggggggcgtttgtgaggtttaactccggcgccgagcccatccttgtacggactgctaccagcttcatcagtgccgagcgagcgtgcgagcacgccgagaaggagattcccgacttcgacttcactgccgtctccaaggccgcaactgatgtctggagggccaagatgagtccgatcaaggtatcaacgaaacaggtgaacagctcgctgttgacaaacttctacagcggcatttaccggaccataatcaaccctcaaaactacacaggggagaatcccctgtggtccagcaaggagccgtactttgactcattctactgcatttgggaccaatttcgatcacagcttccgcttttgaccatcacggatcccacagccgtgactgggatggttcgctcgctgatcgacacataccgccatgtcggatggcttcccgattgccggatgagcctgagtaaaggctacactcagggcgggtccaacgctgacgttgtgttagcggatgctcacgtcaagggactcagagagggcatcaacgttgaaccttacgactggtgctgcgaagggcggggagggctcgacagctggaagtctctcggctacattccagtccaagacttcgactacaagggctttggtaccatgacgagaagcatctcgcgtactctggaatacgcctataacgattactgcatcgcccagatagccgcggctctcggcaagtctgccgagaaggaaaagtacctcgagtcgagcggcaactggcagaacctcttcaaggaagatcaaacctcgatctggtggaacggcaccgacacgggattcaccggcttttttcagccacgctacctcaacaagacctggggcttccaagatccgctaaactgcagcaatcttgacaccgccagcgtttgctcgctccagaacactggccgcgagacctttgagagcagcatctgggagtatggcttcttcgtcccccacgaccaggcaaccctcataagcctctacggcggccccgccgccttcgtgtcccgcctcgactacctccacgacagcgggataacctacattggcaatgagccttccttcctcaccgtcttccaataccactatgccggccgtccggccctctcggcgcgccgagcccacttttacattcctgccttcttctcccctaccccgggcggcctgcccggaaacgacgacagcggcgcaatgggatccttcgtggccttttcgatgatgggcctgttccccaacccgggtcagaacgtctacctgatcacgccacccttcttcgagagcgtcaacatcacgcacccgctcacccacaggaccgcccgcatcaggaacgtcaactttgaccccacgtacaaggccatctacatccagagcgccacgcttgacggcaagctgtacaccaagaactgggtcgaccacagcttctttaccgagggcaaggagcttgtgctgacgctggggcggaacgagagcgcctggggcaccaaggtcgaggacctacccccgagtctgggagcgtatgaagggttcactaagaggagtgggtcactccggagaacggcagccccggatctctggagaaagacggcggctttcaaggggcagtttggaagcctcgaggagagtttgggcatgtga

SEQ ID NO: 368 - protein, 812 aa, Myceliophthora thermophilia
MALPVLLIACWSALAGQVLARNTFDPLAYVDPLIGASNGGNVFPGASLPYGMAKAVADTDSGSRQGGFTMDGAAVTGFSTMHDSGTGGNPSLGNFALFAYTSCPGGDINRCAFPKKTRAAFGRFRNSNVSAKPGTFDITLNSGIRAEMTTTHHASLFRFTFPSDGADEEPARPLILQDLTDLADSRQDNATVAVDPKTGRITGSARFLPSFGAGTFVLHFCTDFKGAEVADSGVFVNSRASTEVHNLTISRSINGYPLPGGAFVRFNSGAEPILVRTATSFISAERACEHAEKEIPDFDFTAVSKAATDVWRAKMSPIKVSTKQVNSSLLTNFYSGIYRTIINPQNYTGENPLWSSKEPYFDSFYCIWDQFRSQLPLLTITDPTAVTGMVRSLIDTYRHVGWLPDCRMSLSKGYTQGGSNADVVLADAHVKGLREGINVEPYDWCCEGRGGLDSWKSLGYIPVQDFDYKGFGTMTRSISRTLEYAYNDYCIAQIAAALGKSAEKEKYLESSGNWQNLFKEDQTSIWWNGTDTGFTGFFQPRYLNKTWGFQDPLNCSNLDTASVCSLQNTGRETFESSIWEYGFFVPHDQATLISLYGGPAAFVSRLDYLHDSGITYIGNEPSFLTVFQYHYAGRPALSARRAHFYIPAFFSPTPGGLPGNDDSGAMGSFVAFSMMGLFPNPGQNVYLITPPFFESVNITHPLTHRTARIRNVNFDPTYKAIYIQSATLDGKLYTKNWVDHSFFTEGKELVLTLGRNESAWGTKVEDLPPSLGAYEGFTKRSGSLRRTAAPDLWRKTAAFKGQFGSLEESLGM

SEQ ID NO: 369 - DNA, 1947 bp, Myceliophthora thermophilia
  CDS (1)...(1947)
atgccggcatcgaacttggcttcgcgcggggaacaagatctgatgggcatggcgtacctcagaagaggctggccgttctgcttccttccgccaaagctgcggcgcagcctggccctcgatcgccgcctcggccgagtgctcttcgctgcgaccctgttcgtgaccctcacgctgctgctccggccctctcgaccgcacttgcaccaccaccaccaccaccaccatccgcatccgcacgccgacgagacccgacagtcgcacttttcggccaacgaccgtcccgagatccgcttccgacccagcagcttcgactggacatccgtggtccagcgctaccccgtctcgtccatccggccgctgcccacgggcagtccgcagccgcagcgtcccatccagcacccctttcccggctacgtgcacgatgccaccacccgggcccggcagcaagctgtccgcgccgccttcgtcaagagctggaggagctacaagacgcacgcctggctgcgagacgagctcgcgcccgtgagcggcggcggcaggaccacattcggcggctgggcggctaccctcgtcgacgcgctggacaccctctggatcatgggcctgaccgacgacttctacgaggccgccgccgccgccgcccggctggactgggccgacacccccgacagcgcggccaacctcttcgagaccaccatccgccacctcgccggcctcctcgccgcctacgacctgagcggcgagcccgccctgctggccaaggcgagagagctcggcgacatgctgtacctggccttcgacacccccaaccgcctgcccgccttctggttccgcttcgaggacgccaggcagggccgccaggtcgccggcaccgacgacccgtccgcgaacccctgctcgctctcgctcgagttcacccgcctgtcgctcctgaccggcgaccccaagtactacgacgccgtcgcccgcgtcaccgacttcctcgagcgctcccagaaccagtcgaggctgcccggcctctggcccaggtccatcaacttccgcgacgagtcggtggaccagcaggccgccttcaccctcggcggccaggccgactcgctgtacgagtacctggccaagatgccggccctgctgggccgcggccgcgcccccgcgagctacgagaacatgtaccgcgccgccatggacgcgtcggcccgccacatcctcttccgccccatggtgcccgacgacgacccggagggccgcgacgtgctcttcgccggcgacgcctacgcctaccgcgaccgccgcgtcgagcgcatcccccagggccagcacctggcctgcttcgccggcggcatgttcgccctcggcggcaggctgttcggcatccccgaccacgtcgccctcggcgagcgcctcgcccgcggctgcgcctgggcctaccacgccttccccaccggcctgatgcccgaggtcttcaccatgctggcctgcgactcgctcgaccgcccctgtccctgggacgaggaccggtggcggcgcgagcgcggcgccgtccgcctgcccagggggttcaagagcgcccgcgacaagcgctacatgctccgcccggaggccatcgagagcctcttcttgctgtacaggatgacgggcaaggaagacctgcgcgagctggcctggcgcatgttccggtccgtcatggaggccaccgagacacccctcgccaactcggccatcgccgacgtcacggtcgagggcaagaccaccaagatggattccatggagagtttctggctggccgaaacgctcaagtacttctacctcatcttctccccgcccgatctcatcagcctggacgactttgtcttcaacaccgaggcccacccgttccggcgagagaaggcggcgtcgattcgcgacacaatagcgcctgtagaaaccgccaaggagggggaagcatag

SEQ ID NO: 370 - protein, 648 aa, Myceliophthora thermophilia
MPASNLASRGEQDLMGMAYLRRGWPFCFLPPKLRRSLALDRRLGRVLFAATLFVTLTLLLRPSRPHLHHHHHHHHPHPHADETRQSHFSANDRPEIRFRPSSFDWTSVVQRYPVSSIRPLPTGSPQPQRPIQHPFPGYVHDATTRARQQAVRAAFVKSWRSYKTHAWLRDELAPVSGGGRTTFGGWAATLVDALDTLWIMGLTDDFYEAAAAAARLDWADTPDSAANLFETTIRHLAGLLAAYDLSGEPALLAKARELGDMLYLAFDTPNRLPAFWFRFEDARQGRQVAGTDDPSANPCSLSLEFTRLSLLTGDPKYYDAVARVTDFLERSQNQSRLPGLWPRSINFRDESVDQQAAFTLGGQADSLYEYLAKMPALLGRGRAPASYENMYRAAMDASARHILFRPMVPDDDPEGRDVLFAGDAYAYRDRRVERIPQGQHLACFAGGMFALGGRLFGIPDHVALGERLARGCAWAYHAFPTGLMPEVFTMLACDSLDRPCPWDEDRWRRERGAVRLPRGFKSARDKRYMLRPEAIESLFLLYRMTGKEDLRELAWRMFRSVMEATETPLANSAIADVTVEGKTTKMDSMESFWLAETLKYFYLIFSPPDLISLDDFVFNTEAHPFRREKAASIRDTIAPVETAKEGEA

SEQ ID NO: 371 - DNA, 2439 bp, Myceliophthora thermophilia; identical to SEQ ID NO: 367
  CDS (1)...(2439)

SEQ ID NO: 372 - protein, 812 aa, Myceliophthora thermophilia; identical to SEQ ID NO: 368

SEQ ID NO: 373 - DNA, 542 bp, Myceliophthora thermophilia
  CDS (1)...(540)
atgacgatgctcaagtcggccctccccgcggcgctggccctcctcctaacggcggccaacggccacccttccaggaccccggcggcggcggcggcggggggatgggcaccgctggcgaatgggacattccggaacccgatcctgtacgaggacttcccggacaacgacgtgtcggtcgggccggacggggccttctacctgtcggcgtccaacttccacttcagccccggggcgcccatcctgcggtcttacgacctggtcgactgggagtttgtgggccactcgatcccgcgcctcgacttcggcgccggctacgacctgccgccgacgggcgagcgggcgtaccgcgcgggcacgtgggcgtcgacgctgcggtaccgcgagagcacggggctctggtactggatcgggtgcaccaacttctggcgcacctgggtcttcaccgccccggcgcccgaggggccctggacccgggcgggcgacttcggcgacagcgtgtgcttctacgacaacggcctgctggtcgacgacgacgacaccat

SEQ ID NO: 374 - protein, 180 aa, Myceliophthora thermophilia
MTMLKSALPAALALLLTAANGHPSRTPAAAAAGGWAPLANGTFRNPILYEDFPDNDVSVGPDGAFYLSASNFHFSPGAPILRSYDLVDWEFVGHSIPRLDFGAGYDLPPTGERAYRAGTWASTLRYRESTGLWYWIGCTNFWRTWVFTAPAPEGPWTRAGDFGDSVCFYDNGLLVDDDDT

SEQ ID NO: 375 - DNA, 1164 bp, Myceliophthora thermophilia
  CDS (1)...(1164)
atgctttccaaggtcttcgcgacggtggccctcgcggcctcgctggtctctgcgcagactttcacggactgcgaccccaccaagcgtgatgactgccccaaccccaaggctgtcggctccaagcccgtcgacatcgacttccgtcagggccccaacagcttcttcaagctggccgatggcacgagcctcaagtacgacaaggatctcggcgcggtcttctcgatcagcaaggagacggatgcccccaccatctcttccaacaagtacatcttcttcggccaggttgacgtgacggtgcgcgctgcccgcggtacgggcgtcgtcaccagcttcgtgctgcagtcggacgacctcgacgagatcgactgggagtggctcggcggcgacgccacccaggtccagaccaactacttcagcaagggctgcaccgagacctacgaccgtggcggtttctctcccgtcgccgacccgatcaaccagttccacacctacaccatcaagtggactcccgagcagctcgactggatcattgacggcaacgtagtccgcacgctcaagaacacgggcgtcgagggctgctccggctacccgcagtcccccatgcagatcaagctcggtacctgggtcgctggccgcaaggacgcgccccagggcaccatcgactgggctggcggtctgaccgacttcagccaggctccgtttgacggatactaccagagcctgcacattgtggactacatgggcggtcgcggcgccaaggaggccaccgagtaccactacacggaccgcagcggcaagtgggagagcatcgaggttatcaacgacggcaagggatccgacgacgacaccaccacctcctccaagaccagcgcgacctcgaccaaggccacctcgacctccaagcctagctcgtccagctcgcccagctcgtctcacatcggccacaccctcaccaccctcaccaccgtgagctcctcggctacccggagcgccagcagcaccgacggcgcggcttccaccagcggcccgaccagcaccagcggcaatgaggttgatcccacctccactgcctctcagaccgtgtccacaggtgctgccccgagcatggctggcaatctagccgccgtgggcgctgctgccctctttggctacctcgccctctaa

SEQ ID NO: 376 - protein, 387 aa, Myceliophthora thermophilia
MLSKVFATVALAASLVSAQTFTDCDPTKRDDCPNPKAVGSKPVDIDFRQGPNSFFKLADGTSLKYDKDLGAVFSISKETDAPTISSNKYIFFGQVDVTVRAARGTGVVTSFVLQSDDLDEIDWEWLGGDATQVQTNYFSKGCTETYDRGGFSPVADPINQFHTYTIKWTPEQLDWIIDGNVVRTLKNTGVEGCSGYPQSPMQIKLGTWVAGRKDAPQGTIDWAGGLTDFSQAPFDGYYQSLHIVDYMGGRGAKEATEYHYTDRSGKWESIEVINDGKGSDDDTTTSSKTSATSTKATSTSKPSSSSSPSSSHIGHTLTTLTTVSSSATRSASSTDGAASTSGPTSTSGNEVDPTSTASQTVSTGAAPSMAGNLAAVGAAALFGYLAL

SEQ ID NO: 377 - DNA, 963 bp, Myceliophthora thermophilia
  CDS (1)...(963)
atgaagggtgtttccatcgcaggggccttctcgggcctccttagcttggcctcagctgcctctttctcgaatcctctcaaacccttcaacgggtcagatcctcatatgacctactatgatgggtactattatctgatgacgacaacatggaccgacctgcagataacccgagccaagaccttagagggcctcaaaaacggagagaccagggtggtttggactgactcggatccctcccgctgctgcaatgtctgggcacccgagcttcacaagattgacaacaagtggtacatctactacacagctggaaacaaccagaacctagatggccagcggtctcatgtcctagaaggtggttctgacccgtggggccagtactcctatgccggacagctcacccaagactggggcatcgacggtacgattctccgcgtccagaaccagaactactttgtttggtcctgcttctcggacggtatccagtccctctgcattgcgcctttgcagtcaccgacttcgattggctctccccgagtgctctcgcaaccgctcctggactgggaacgggtcgacactccggttaatgaggggccggcaccgctctaccatgatggaaaaatcttcctcgcctatagtgccagtttctgctggacacctagctaccaactcggcctccttacttacaacgggggggatccgactgcagccagcagctggacaaagacggggcccttcttcagctcggcaaatggaaactacggtccgggacacaattcgtttgtcaatagcccggacggcaccgagatctggaacatctaccatgcgacctccatctcaactggtaattgtgatggcaacaggtacaccgcggccaagaaggtgacctggaattcggatggctctcccaactttggcagccccgatcccctaggcgttgtcactcctgggccctcgggggagtaa

SEQ ID NO: 378 - protein, 320 aa, Myceliophthora thermophilia
MKGVSIAGAFSGLLSLASAASFSNPLKPFNGSDPHMTYYDGYYYLMTTTWTDLQITRAKTLEGLKNGETRVVWTDSDPSRCCNVWAPELHKIDNKWYIYYTAGNNQNLDGQRSHVLEGGSDPWGQYSYAGQLTQDWGIDGTILRVQNQNYFVWSCFSDGIQSLCIAPLQSPTSIGSPRVLSQPLLDWERVDTPVNEGPAPLYHDGKIFLAYSASFCWTPSYQLGLLTYNGGDPTAASSWTKTGPFFSSANGNYGPGHNSFVNSPDGTEIWNIYHATSISTGNCDGNRYTAAKKVTWNSDGSPNFGSPDPLGVVTPGPSGE

SEQ ID NO: 379 - DNA, 1836 bp, Myceliophthora thermophilia
  CDS (1)...(1836)
atgttcttcgcttctctgctgctcggtctcctggcgggcgtgtccgcttcaccgggacacgggcggaattccaccttctacaaccccatcttccccggcttctaccccgatccgagctgcatctacgtgcccgagcgtgaccacaccttcttctgtgcctcgtcgagcttcaacgccttcccgggcatcccgattcatgccagcaaggacctgcagaactggaagttgatcggccatgtgctgaatcgcaaggaacagcttccccggctcgctgagaccaaccggtcgaccagcggcatctgggcacccaccctccggttccatgacgacaccttctggttggtcaccacactagtggacgacgaccggccgcaggaggacgcttccagatgggacaatattatcttcaaggcaaagaatccgtatgatccgaggtcctggtccaaggccgtccacttcaacttcactggctacgacacggagcctttctgggacgaagatggaaaggtgtacatcaccggcgcccatgcttggcatgttggcccatacatccagcaggccgaagtcgatctcgacacgggggccgtcggcgagtggcgcatcatctggaacggaacgggcggcatggctcctgaagggccgcacatctaccgcaaagatgggtggtactacttgctggctgctgaaggggggaccggcatcgaccatatggtgaccatggcccggtcgagaaaaatctccagtccttacgagtccaacccaaacaaccccgtgttgaccaacgccaacacgaccagttactttcaaaccgtcgggcattcagacctgttccatgacagacatgggaactggtgggcagtcgccctctccacccgctccggtccagaatatcttcactaccccatgggccgcgagaccgtcatgacagccgtgagctggccgaaggacgagtggccaaccttcacccccatatctggcaagatgagcggctggccgatgcctccttcgcagaaggacattcgcggagtcggcccctacgtcaactcccccgacccggaacacctgaccttcccccgctcggcgcccctgccggcccacctcacctactggcgatacccgaacccgtcctcctacacgccgtccccgcccgggcaccccaacaccctccgcctgaccccgtcccgcctgaacctgaccgccctcaacggcaactacgcgggggccgaccagaccttcgtctcgcgccggcagcagcacaccctcttcacctacagcgtcacgctcgactacgcgccgcggaccgccggggaggaggccggcgtgaccgccttcctgacgcagaaccaccacctcgacctgggcgtcgtcctgctccctcgcggctccgccaccgcgccctcgctgccgggcctgagtagtagtacaactactactagtagtagtagtagtcgtccggacgaggaggaggagcgcgaggcgggcgaagaggaagaagagggcggacaagacttgatgatcccgcatgtgcggttcaggggcgagtcgtacgtgcccgtcccggcgcccgtcgtgtacccgataccccgggcctggagaggcgggaagcttgtgttagagatccgggcttgtaattcgactcacttctcgttccgtgtcgggccggacgggagacggtctgagcggacggtggtcatggaggcttcgaacgaggccgttagctggggctttactggaacgctgctgggcatctatgcgaccagtaatggtggcaacggaaccacgccggcgtatttttcggattggaggtacacaccattggagcagtttagggattga

SEQ ID NO: 380 - protein, 611 aa, Myceliophthora thermophilia
MFFASLLLGLLAGVSASPGHGRNSTFYNPIFPGFYPDPSCIYVPERDHTFFCASSSFNAFPGIPIHASKDLQNWKLIGHVLNRKEQLPRLAETNRSTSGIWAPTLRFHDDTFWLVTTLVDDDRPQEDASRWDNIIFKAKNPYDPRSWSKAVHFNFTGYDTEPFWDEDGKVYITGAHAWHVGPYIQQAEVDLDTGAVGEWRIIWNGTGGMAPEGPHIYRKDGWYYLLAAEGGTGIDHMVTMARSRKISSPYESNPNNPVLTNANTTSYFQTVGHSDLFHDRHGNWWAVALSTRSGPEYLHYPMGRETVMTAVSWPKDEWPTFTPISGKMSGWPMPPSQKDIRGVGPYVNSPDPEHLTFPRSAPLPAHLTYWRYPNPSSYTPSPPGHPNTLRLTPSRLNLTALNGNYAGADQTFVSRRQQHTLFTYSVTLDYAPRTAGEEAGVTAFLTQNHHLDLGVVLLPRGSATAPSLPGLSSSTTTTSSSSSRPDEEEEREAGEEEEEGGQDLMIPHVRFRGESYVPVPAPVVYPIPRAWRGGKLVLEIRACNSTHFSFRVGPDGRRSERTVVMEASNEAVSWGFTGTLLGIYATSNGGNGTTPAYFSDWRYTPLEQFRD

SEQ ID NO: 381 - DNA, 1629 bp, Myceliophthora thermophilia
  CDS (1)...(1629)
atggggcgcctaaacgatctcatagccctccttgcactgttgagcggcagtgccacatccgctgccgtaagaaacacggcttctcaggctcgcgcggcggaattcaacaacccggtgctctgggaggactatccggacctggacgtgttccgggtcgggtcgaccttctactactcctcctccacgttcgcctactccccgggggctccggtgctcaagtcgtacgacctggtgaactggacccccgtcacccactcggtcccgacgctcaactttggggaccgctacaacctcacgggcggcacgccggccggctacgtcaagggcatctgggcgtcgacgctgcggtaccggccctccaacgacaagttctactggtacggctgcgtcgagttcggcaagacgtacatctggaccagctccggcacgcgcgcgggcgacagggacggcgaggtggaccccgccgactgggtctgggagccgcacccgcccatcgaccggtgctactacgacagcggcctgttgatcgacgacgacgacaagatgtacatcgcgtacggcaaccccaagatcgaggtcgccgagctgtccgacgacgggctcaccgaggtctcctcccgggtcgtctacaccccgccggccggcaccaccattcgagggctcgcgcatacgccgagtgggtgctccggtcgacgtccgggccctttcggcccgtacgagcagcgcgagctcgtgtcgcgcatcaacgggcccctctccaacgccggcttcgcccaccagggcggcatggtcgacaccccggacggccgcagctggtactacgtcgccttcatggacgcgtacccggggggccgcatccccgtggtcgcgccgctgcgctggacggacgacgggtggcccgaggtggtgacggacgcgcagggcggctggggcgccagctacccggtccccgtggagacgggcaagacggtgccggacgacggctgggagctggacgagttcaggggcggccggctgagccaccactgggagtggaaccacaacccggacccggcccgcttcgcgctcgcgggcggggacgagggcgggctggtgctgcaggcggcgacggtgacggaggacctgttcgcggccaggaacacgctcacgcggaggatcaggggccccaagtcgagcggcacgttccggctggacgtcagcaggatgcgcgacggcgaccgggccggggccgtgctgttccgggacacggcggcgtatatcggcgtgtggaagcaaggggacgaggccaccatcgtcgtagtcgacggccttgagctggctctgagctcctggacgaccgtctcgaccgggagggtggccgagacgggcccgaccctgagcagcacgcaggatgtctggctccggatcgaggccgacatcacgcccgcgttcgggaccaacacggcaaggaccacgactttctcgtacagtgtggacggcgggaagacctttgtccgtcttggcccggccttctcgatgagcaatacttggcaatactttacgggctacaggttcggagtcttcaactttgccaccaaggagcttgggggcgaagtcaaggtcaagagcttccagatgcagcctctgtga

SEQ ID NO: 382 - protein, 542 aa, Myceliophthora thermophilia
MGRLNDLIALLALLSGSATSAAVRNTASQARAAEFNNPVLWEDYPDLDVFRVGSTFYYSSSTFAYSPGAPVLKSYDLVNWTPVTHSVPTLNFGDRYNLTGGTPAGYVKGIWASTLRYRPSNDKFYWYGCVEFGKTYIWTSSGTRAGDRDGEVDPADWVWEPHPPIDRCYYDSGLLIDDDDKMYIAYGNPKIEVAELSDDGLTEVSSRVVYTPPAGTTIRGLAHTPSGCSGRRPGPFGPYEQRELVSRINGPLSNAGFAHQGGMVDTPDGRSWYYVAFMDAYPGGRIPVVAPLRWTDDGWPEVVTDAQGGWGASYPVPVETGKTVPDDGWELDEFRGGRLSHHWEWNHNPDPARFALAGGDEGGLVLQAATVTEDLFAARNTLTRRIRGPKSSGTFRLDVSRMRDGDRAGAVLFRDTAAYIGVWKQGDEATIVVVDGLELALSSWTTVSTGRVAETGPTLSSTQDVWLRIEADITPAFGTNTARTTTFSYSVDGGKTFVRLGPAFSMSNTWQYFTGYRFGVFNFATKELGGEVKVKSFQMQPL

SEQ ID NO: 383 - DNA, 1428 bp, Myceliophthora thermophilia
  CDS (1)...(1428)
atggcgctcgccagctatagccaatgcgcccactcgttcgtcatgatcaagtctgacaacaccttgatcgagtggaggtgccacgactgccacgacggcccgttctggttcatctgggaatgccgaggcccatgccgcgagaaagcaattgcagccgagcactcactggaagcagccaaggcgctccaaggctggtacgatgccccgtcggggctgtggagcacaacgggctggtggaacagcgcaaactgccttactgtcctcgccgactgggcgctgagcgccggagccgccgctaaaagcttggatgtccctaaaatcatcgccaacacgttcaataacgcccagcgagtgtctgtgacagcgcagaagagggtagctgcgactggcttggccacatccacctaccattttgaccaccaggcaaagcggggattctcccagttcatcaacaactactacgatgatgagggctggtgggcgctcgccctgatcaggtcgtgggacgtaacccacgaccaggcctacctcgacatggccgagcgcatctttgaggacatgcaagctggcacggacgataggtgtggcggcggtatttggtggagcaaggagaagcagtacaagaacgccatcgcaaatgagttgtacctcagcgtggctgccagcctcgccaaccgcatccccgacaagaaacagaggtacgagcaactcgccaaggacgagtgggtgtggttcaaggacagcgggatgatcaacaagaacaacctcatcaacgacgggctcgccatcgacgtcaacggcagatgcaccaacaacggcctgaccacgtggtcgtacaatcagggcgtcgtgctgggcggcctggtcgagctcgccaacgccacgggcgacccgtcgtacctgggtgaggcgacggccatcgcgaaagcagctgtcgagcttctcagcgacgaaaatggcatcattcgcgaggcggaccggtgcgagcccgactgtggtgcagacggcagccagttcaagggcatcttcgtgcgcaacttgcattacctgcagcgagcggctccacaggatgcattccggacggcgatccagaagaatgccgactcaatctgggcgaataaccggaacggcaagaaccaattcggcatccagtgggccgggccggcagacgtgggtaacggaccgaacgctgcgacgcatagctcggcgatggacgtgatcgttgcggcgttggcgattggccggcaggccaccatggacgccccggaagacgatctcgacatcaagctccagaagatctcgggcgatcttatcgccgactttgacacgtcgctcctcccgttcctcaggaaaccgaatgccgccggcggaggaggaaccggtgccgtccgttcgtggcatcaggcccagaagaaaagagcaacataa

SEQ ID NO: 384 - protein, 475 aa, Myceliophthora thermophilia
MALASYSQCAHSFVMIKSDNTLIEWRCHDCHDGPFWFIWECRGPCREKAIAAEHSLEAAKALQGWYDAPSGLWSTTGWWNSANCLTVLADWALSAGAAAKSLDVPKIIANTFNNAQRVSVTAQKRVAATGLATSTYHFDHQAKRGFSQFINNYYDDEGWWALALIRSWDVTHDQAYLDMAERIFEDMQAGTDDRCGGGIWWSKEKQYKNAIANELYLSVAASLANRIPDKKQRYEQLAKDEWVWFKDSGMINKNNLINDGLAIDVNGRCTNNGLTTWSYNQGVVLGGLVELANATGDPSYLGEATAIAKAAVELLSDENGIIREADRCEPDCGADGSQFKGIFVRNLHYLQRAAPQDAFRTAIQKNADSIWANNRNGKNQFGIQWAGPADVGNGPNAATHSSAMDVIVAALAIGRQATMDAPEDDLDIKLQKISGDLIADFDTSLLPFLRKPNAAGGGGTGAVRSWHQAQKKRAT

SEQ ID NO: 385 - DNA, 1194 bp, Myceliophthora thermophilia
  CDS (1)...(1194)
atgtatctccccctgcggcttgctcttgtgtcgctcggcctgctgttggcgtgcgccgaagcggccgaaccgtaccgccttcgcgctccccccctcgacacgccgtggaccaaagatgtgggcacgaacccttggccgcagcatcctcgcccccagctccgccgcgatgcttggaagacgctcaacggcatctggacataccagccaacccaaggcgctcccgacgccggcgccctcccgaagctgcctctggagaaggaagttctgattccctcgtgcatcgagagcggtatttccggcattatggatatgagttttcaggtcactaggatgtggttcgggaccaacttcaccgtgcccccgcgctggaccgagtcgggccgccgcgtcctgctcaactttgaggcggtcgactacgaggccaccgtctacgtcaatggcgcggaggtcgggttcaaccgcggcggttacgctcgcttcacctttgacattaccgatcaccttgctgagaacggtgccaatgagctccacgtcttcgtcttcgacccgacggatgaccagagcatcccccagggcaagcagaccaagcgaccctcgcacatcttctacacgccatgcacgggcatctggggaaccgtgtggctcgagagcgtcccggacaacttcatctcgggcctcgacctggccggcgacatggacggcaagctgaccgtcaccgtccacagccggaccaagaaggagaccccggtcgagatctcggtcgtggctccgcacggcggtgtgggggccaagcacgagggcgtctcggaccgcgagttcacgctccgggtgcccgaccccgacctctggtcgcccgactcgcccaccctgtacaacgtcaccgtcaagttgggcgcggacgaggtcaccagctacacgggcttccggaccatctcctccggcgtggtcaacgggatcaagcgccccctgctcaacggcgagttcgtcttcctgttcggcccgctcgaccagggctactggccggacggcatctacaccccaccgacgttggaagccatggtctacgacctgagagtgattaagagcctggggatgaacatgctccgaaaacacatcaagattgagccagacctgttctatgaggcctgcgaccggctcggagtcatggttttccaggacatgccctcaatgtga

SEQ ID NO: 386 - protein, 397 aa, Myceliophthora thermophilia
MYLPLRLALVSLGLLLACAEAAEPYRLRAPPLDTPWTKDVGTNPWPQHPRPQLRRDAWKTLNGIWTYQPTQGAPDAGALPKLPLEKEVLIPSCIESGISGIMDMSFQVTRMWFGTNFTVPPRWTESGRRVLLNFEAVDYEATVYVNGAEVGFNRGGYARFTFDITDHLAENGANELHVFVFDPTDDQSIPQGKQTKRPSHIFYTPCTGIWGTVWLESVPDNFISGLDLAGDMDGKLTVTVHSRTKKETPVEISVVAPHGGVGAKHEGVSDREFTLRVPDPDLWSPDSPTLYNVTVKLGADEVTSYTGFRTISSGVVNGIKRPLLNGEFVFLFGPLDQGYWPDGIYTPPTLEAMVYDLRVIKSLGMNMLRKHIKIEPDLFYEACDRLGVMVFQDMPSM

SEQ ID NO: 387 - DNA, 852 bp, Myceliophthora thermophilia
  CDS (1)...(852)
atgataatgatgagactcaagtcgggactggccggggcgctggcctggggaacgacggcggcggcggcggcggcggtggcgagagtgggagccggcgcggccgcgaactcgacctactacaacccgatcctccccgggtggcactcggacccgtcgtgcgtgcaggtggaggggatcttctactgcgtgacgtcgaccttcatctcgttccccggcctgcccatctacgcgtcccgggacctgatcaactggaagcacgtcagccacgtgtggaaccgcgagtcccagctgcccgggtacagctgggcgacggagggccagcaggagggcatgtacgcggcgacgatccggcaccgcgagggcgtcttctatgtcatctgcgagtacctgggcgtcggcggcagggacgccggcgtgctcttccgggcgacggacccgttcgacgacgcggcctggagcgacgccctgaccttcgccgcgcccaagatcgacccggacctgttctgggacgacgacgggacggcctacgtggcgacgcagggcgtgcaggtgcagcgcatggacctcgacacgggcgccatcggcccgcccgtgccgctgtggaacgggacgggcggggtgtggcccgagggcccgctcatctaccgccgcgccgaccacttctacctcatgatcgccgagggcggcacggccgaggaccacgccatcaccatcgcccgcagcgaccggctgacggggccctacgtctcctgcccgcacaacccgatcctgaccaaccgcggcacggacgagtacttccagacggtcggccacggcgacctcttccaggacgccgccggcaactggtggggc

SEQ ID NO: 388 - protein, 284 aa, Myceliophthora thermophilia
MIMMRLKSGLAGALAWGTTAAAAAAVARVGAGAAANSTYYNPILPGWHSDPSCVQVEGIFYCVTSTFISFPGLPIYASRDLINWKHVSHVWNRESQLPGYSWATEGQQEGMYAATIRHREGVFYVICEYLGVGGRDAGVLFRATDPFDDAAWSDALTFAAPKIDPDLFWDDDGTAYVATQGVQVQRMDLDTGAIGPPVPLWNGTGGVWPEGPLIYRRADHFYLMIAEGGTAEDHAITIARSDRLTGPYVSCPHNPILTNRGTDEYFQTVGHGDLFQDAAGNWWG

SEQ ID NO: 389 - DNA, 1916 bp, Myceliophthora thermophilia
  CDS (1)...(1914)
atgtccgcttttatcgtcacgtacccgccgctcggccaagttacgcagctccagaactctgaactgacgatccatgcggttctggagattcctcctgaatctactacggagaattggcagcttgctctctggtattccaacggagatcaggaggaatgggaagaagcagtcttagttccctctatccacgatgtccgtcccacggaactacacgaatccattggagccgcggcgaggttgtacttcacgacccgggtagtcgtcaggtcctcgttaaccttcaccatcaagtttcgtcaaggcaccgatgaccaagaatggaaatgggttcgcagcgagcagggctcgggtgatgccattgtgatcatcaaccagaaaccaactcgagaggacgaccccgaggacctgcctgacctgattcgggatctgaatccggagctggaatggaaacgccacatgagccagtctcctggaacgcgcctgtggactgttgaggcacaagtacacggggcaaaggaggatgaatcagcgtttgtcgaagtaccactgggcattccgtggggcgggcggttcctcagatggtttgccctggttcggtcctggaccccatggcttgctcccagacacggcaagtcagagttcggcctggacaaggatggcttactttgttcgtttctctcctctcacgggaagcacttggtgatgcttggacttggcggaatcaacaatgtcactgcgctcttgcgcagcggtgacgctggccgtctgatactcagccttcgaaacgataatgtgaaatcaacaacaggaacggttctggtagccgtcggtgacaaccttgagaacgcggttgctgccgtcatgtaccacgcccggacccttgttacggcagcgaatgctccaaattctcacggtatagcctcgcccacggcagagggcgatgtcgggccgcaatggtatgaaaattggtacgacggtttgggatactgcacatggaactcgttgggccagcagttgaccgaggagaagatcctgaatgcactagacacgttggccgagaacaaggtcaacatctctaacctgatcatcgatgacaactggcaagacattgactaccgcggcgacggccaatggcagtacggctggaacgacttcgaagccgagccgagagccttcccccggggcctcgaagccctcgtctccgacatccggtccaagcacaagaacatacagcacatcgcagtctggcatgccctcctaggctactgggccggtctcgccccctccgggccccttgtcaaacgctacgaaaccgtccaggtctcacgcgacgacacccaaaagtcccacctccccatcggcaacgccatgacggtcgtcgctccttccgacgtccaggacttctacgaagacttctaccgcttcctcacctcctgcggcatcgacggcgtcaagactgacgcccagtacatgctcgacacgctcacccagcccgccgcccgccgcacccttactagctcctacctcgacgcctggacctcctccaccctcggccacttcgccgggggccccgtggtcgcgggcatggcgctgtccccgcccacgctcttccacccccgcctgttccgcaccagcctgccgcagattgtgtgtcgtacctcggacgacttcgtcccgaccggcggcggcgacgacagcgacgacgacgcgcacccgtggcacgtgtggaccaacgcgcacaacgcactgctcgcgcagcacctcaacgcgctgccggactgggacatgttccagacggcacacccgcggggcgggttccacgcggcggcgcggtgcgtcagcggcgggtctgtttgtgtcatggactcgcccggccagcacgacgaggagctgctgctccagatcacgggcgccac

SEQ ID NO: 390 - protein, 638 aa, Myceliophthora thermophilia
MSAFIVTYPPLGQVTQLQNSELTIHAVLEIPPESTTENWQLALWYSNGDQEEWEEAVLVPSIHDVRPTELHESIGAAARLYFTTRVVVRSSLTFTIKFRQGTDDQEWKWVRSEQGSGDAIVIINQKPTREDDPEDLPDLIRDLNPELEWKRHMSQSPGTRLWTVEAQVHGAKEDESAFVEVPLGIPWGGRFLRWFALVRSWTPWLAPRHGKSEFGLDKDGLLCSFLSSHGKHLVMLGLGGINNVTALLRSGDAGRLILSLRNDNVKSTTGTVLVAVGDNLENAVAAVMYHARTLVTAANAPNSHGIASPTAEGDVGPQWYENWYDGLGYCTWNSLGQQLTEEKILNALDTLAENKVNISNLIIDDNWQDIDYRGDGQWQYGWNDFEAEPRAFPRGLEALVSDIRSKHKNIQHIAVWHALLGYWAGLAPSGPLVKRYETVQVSRDDTQKSHLPIGNAMTVVAPSDVQDFYEDFYRFLTSCGIDGVKTDAQYMLDTLTQPAARRTLTSSYLDAWTSSTLGHFAGGPVVAGMALSPPTLFHPRLFRTSLPQIVCRTSDDFVPTGGGDDSDDDAHPWHVWTNAHNALLAQHLNALPDWDMFQTAHPRGGFHAAARCVSGGSVCVMDSPGQHDEELLLQITGA

SEQ ID NO: 391 - DNA, 2433 bp, Myceliophthora thermophilia
  CDS (1)...(2433)
atgggccggccatgggaagtggtgtttacgctgctaatcgctctgcagggcgtcctctctctccccacccgggtcatcacaagcccaggccgatctgacaacacggcctggatcgttgccagcgaaaaacacccagccggcggtgttatcccacccatccttgagaccgagaccgccaaacgcgtcaccccggtgtcgaatttgactacttcagtcccaaagccgactcctttgctcgtcacagcttccgctgttgcgagtctgcacttgtcgttgcccaccggcgccgtcaatatgcccggccaagacatcttcgccgatcccatttccacggatgcgccacctgccacattcggcaaaaagggggatcatcccgtgccgagactgggcgttcggggcaacggcccattcgagaccaacaagttctatggcagcctgcaactcggaacccagacctccccggtcttcctccacccgtactcggtcgtctgggctcgaggcgagggttcttccaagagctggggactggcaatctcgcatgttgaggccagccagagagtctacggcgagaccaaccagtcgacgggagctgcggaatacttcctcaaccccgtggggatccattccgtctgcctctcggcgaaggagctggggaatgacaccgccctcaccaccgaggagctgaccgacttctccgtccgggtcggcctgcgcccgagcgccgaggcgccgcccgcggtgcagttccccttggtccaggggctcggcttcatcacggccatctacgatggcgcaacccccgtgctccagacgggcgaacgcttcaaggcggtgacgcgggcatccgcggaccccaaggacggggtcgttaagtacaagctcgagctcgagtccggaaccacctggctggcgtatgcgcaccacaccgagggcgacccgctggatctggagtcgaccgacaccgggctcgctcaggcaaaggggccgtttcgcggcttcatccaggtggctaaggacccgggagacggcgagaaggtgtatgaccaggccgccggtgcctacgccaccggcgtccagctctccgggtccgtcgacggcgcaagggggacatataccttctcgttcaagaaggccggcatcgaagggaccacgctcgtcatgttcgcgctgcctcatcacgtaggctccttcgatgacgccaccaaggctaaagtgacggacctgaagctgcagaccacgactaagggggtgggagccgccgtcgtggccgactcctggaccatggtcgaggacaacctgccgacaaacatcggattcctgccgtggtctcccgaggccgggagcgccgccaacatctcggatggcactaagcaggccattcacggcgtcgcgcaggccgaggtctcgcaggatatcaagcagctgtctgacgtagactcgatgtacttcgccggaaaggcgctggccaagtatgccaccctcgtcctggcaatccgggagatgctgggggatcaggccatggcccagaccgggttgaaccagctgaaagaggcattcgcccgctttgcgcagaatcagcaaaagcacccgctggtatatgagagtgcctggggaggcgtcgtttcgtccgccacgtacgacacgggcgacaccgggctcgactttggcaacacgctctacaacgaccaccacttccactggggctacttcatctacacggcagccgtgatcggacatctcgacccgtcgtgggcggaggaaaacaaggcctacgtcaacacgctcgtccgcgacatcgccaaccccagctcaaacgaccagtacttccccctctggcggtcctttgactggtaccacggccacagctgggctcacgggctcttcgacgcgctcgacggcaaagaccaagagtccagctcagaagacaccatgcacacctacgccctgaagctgtgggggtctgtgattggtgacacgaacctggaagcccgcggcaacctcatgctcgcggtccagagccgctctctccggtcctactacctctacacctcggacaacacgatccaggaccccaagtttatcggaaacaaggtggccggcatcctgttcgagaacaaggtccaccacacgacctacttcggcaacaacaccgagtacatccagggcatccacatgctgccgctgctgccgcagaccccctacgtgcgcaccccagcctttgtccgcgaggagtgggagacctacttcagcaacggccgcgccgacgccatcgcgggcggctggaggggcgtgctgctgggcaactacgccaccgtcgacccaaaggccgcctacgacttcttcgccaggtccgactttgacagctcctggctggacgacggcgccacccggacctggtatatgtgctatgctgccgcgttgggcaagctgtga

SEQ ID NO: 392 - protein, 810 aa, Myceliophthora thermophilia
MGRPWEVVFTLLIALQGVLSLPTRVITSPGRSDNTAWIVASEKHPAGGVIPPILETETAKRVTPVSNLTTSVPKPTPLLVTASAVASLHLSLPTGAVNMPGQDIFADPISTDAPPATFGKKGDHPVPRLGVRGNGPFETNKFYGSLQLGTQTSPVFLHPYSVVWARGEGSSKSWGLAISHVEASQRVYGETNQSTGAAEYFLNPVGIHSVCLSAKELGNDTALTTEELTDFSVRVGLRPSAEAPPAVQFPLVQGLGFITAIYDGATPVLQTGERFKAVTRASADPKDGVVKYKLELESGTTWLAYAHHTEGDPLDLESTDTGLAQAKGPFRGFIQVAKDPGDGEKVYDQAAGAYATGVQLSGSVDGARGTYTFSFKKAGIEGTTLVMFALPHHVGSFDDATKAKVTDLKLQTTTKGVGAAVVADSWTMVEDNLPTNIGFLPWSPEAGSAANISDGTKQAIHGVAQAEVSQDIKQLSDVDSMYFAGKALAKYATLVLAIREMLGDQAMAQTGLNQLKEAFARFAQNQQKHPLVYESAWGGVVSSATYDTGDTGLDFGNTLYNDHHFHWGYFIYTAAVIGHLDPSWAEENKAYVNTLVRDIANPSSNDQYFPLWRSFDWYHGHSWAHGLFDALDGKDQESSSEDTMHTYALKLWGSVIGDTNLEARGNLMLAVQSRSLRSYYLYTSDNTIQDPKFIGNKVAGILFENKVHHTTYFGNNTEYIQGIHMLPLLPQTPYVRTPAFVREEWETYFSNGRADAIAGGWRGVLLGNYATVDPKAAYDFFARSDFDSSWLDDGATRTWYMCYAAALGKL

SEQ ID NO: 393 - DNA, 1371 bp, Myceliophthora thermophilia
  CDS (1)...(1371)
atggcgagaacgcttcgatacctgctgtgcggcatcctcgcgttagcggcgggcagcaatgcggttcccgcagcccgtggttcgacccgagcggccccggcggcagagcccagcactagtgcgacgacatacgaggccgaagatgccatcctgagcggaaccacggtcgataccgctcaggagggatataccggatccggttacgtgaccggtttcgatgaggcgagcgacaagatcacgtttgaggtcgagagcgaggccactaagctctatgacctcagcatccgcatcgcggccatctacggcgacaaacacacgacggtggtgctgaacggcggggcgagcagcgacgtgtccttcccggccggcgacacgtgggtcgatgtcccggccggacaggtcctcctgaacgagggcgccaacacgatcgagattgtcagcaactgggggtggtacctcgtcgactccatcacgctcacgccctcggcgccgcggcccgagcaccagatcaaccggtccctcaacaacccgtcggccgacgcgagcgccagggccctgtacgactacctgcgctccatctacggcaagaagatcctcgcgggccagcaggacctgacctgggccgactacgtgacccagcagacgggcaagacgcccgcgctcgtgtcggtcgacctgatggactactcgccctcgcgggtcgagcgggggaccaagggcacgtcggtcgaggaggccatcacgcacgccgagcgcggcggcatcgtctcggccctctggcactggaacgcgcccgcgggcctgtacgacaccgacgagcacccctggtggagcggcttctacacggacgcgaccgacttcgacgtcgccgccgcgctgagctccaccgacaacgcaaactacaccctcctgctgcgcgacatcgacgccatcgccgtccagctcaagcgcctccgggacgcccgcggcccggacccggccaagcagctctacgccctgctctacgaccgcctcgtcaaccaccacggcatcaacaacctcatctgggtctggaactcgctctcgcccgactggtatcccggcgacgacacggtcgacatcctgagcgcggacgtctacgctcaggggaacggctacaaccagctcatcgacctcggcaaggataagaagatgatcgccgcggccgaggtgggcgccgcgccgcttccggatctgctgcaggcctacgaagcccattggttgtggttcgccgtctggggcgacacgttcataaacaacgccgagtggaactcgcccgaggtcctgaagacggtctacaccagcgactacgtcctcaccctggacgagattcagggctggcaggattcgtga

SEQ ID NO: 394 - protein, 456 aa, Myceliophthora thermophilia
MARTLRYLLCGILALAAGSNAVPAARGSTRAAPAAEPSTSATTYEAEDAILSGTTVDTAQEGYTGSGYVTGFDEASDKITFEVESEATKLYDLSIRIAAIYGDKHTTVVLNGGASSDVSFPAGDTWVDVPAGQVLLNEGANTIEIVSNWGWYLVDSITLTPSAPRPEHQINRSLNNPSADASARALYDYLRSIYGKKILAGQQDLTWADYVTQQTGKTPALVSVDLMDYSPSRVERGTKGTSVEEAITHAERGGIVSALWHWNAPAGLYDTDEHPWWSGFYTDATDFDVAAALSSTDNANYTLLLRDIDAIAVQLKRLRDARGPDPAKQLYALLYDRLVNHHGINNLIWVWNSLSPDWYPGDDTVDILSADVYAQGNGYNQLIDLGKDKKMIAAAEVGAAPLPDLLQAYEAHWLWFAVWGDTFINNAEWNSPEVLKTVYTSDYVLTLDEIQGWQDS

SEQ ID NO: 395 - DNA, 2949 bp, Myceliophthora thermophilia
  CDS (1)...(2949)
atgcacgtcccaggcccattgtcctcgcggtggacggcctaccttggcctgctgtccgcattttctgcagcatttgcacctgcagtcgccgtcaaggagcatgacttcaaaaagtgccatcaatcgggcttttgtaagcgcaaccgcgaattcgccgaccacgccctcgccacgagctcctgggcgtcaccctacaatgtcgcaccagattccggatcgttcaaagatggccagtaccaggctgtgatcttgaagaccaccaacagcggcgagacggttcggcttcccattaccgtctctttccttgagtctggtacagcgcgagtcacggtggacgaagagaagcgccagaaaggagagattgagttgcgccatggcagcaaagcgaggaaagagcgctataacgaggcagagaaatgggccattgttggagggatgactttggacaaggaggccaaggtcgattatgaggacaagacgcagattaccgtcaagtacgggccaacctccaagttcgaggcaaccatcaaattctctcccttcagcatcgacttcaagcgggacggcatcagccacgtcaaactcaacgaccagggcctccttaacatcgagcactggaggccaaaggttgacaaaccggagcccgagaagaaggacggcgattcgactgaagagaataaggcagaggaagcaaaggaggagcccaagggagaggatgagtctacctggtgggaggagacatttggcggcaacaccgataccaagcctcgcggcccggagagcgtcggtcttgacatctccttcgtcggctacgaacacgtctacggcatcccctcccatgccagctcgctgtcgctgaagcagacccgtggcggcgagggcaactaccaggagccgtacaggatgtacaatgctgacgttttcgagtacatcctcgatagcccaatgactctctacggctctattcctttcatgcaggcccatcgtaaggactcgagcgtgggcgttttctggctgaatgccgcggagacgtgggttgacatcaccaaggcgaaagactccaagaacccgctctctctcggcggcaaggccaggaccaacacgcatacccactggttctccgagagcggtctgctggacgtttttgtcttcctcggcccgacgcccaaggatttgaccgccaggtacggtgagctcactggcaccactgcaatgccccaggagttcgctctcggataccatcagtgccgttggaactacgtctcggacgaggacgtaagggatgtggaccgcaagatggacaagttcaagatgccgtacgacgtcatttggctcgacatcgagtacactgacgagaagaagtactttacctgggacaaacactcgtttacagaccccatcggcatgggcaagcagctggacagtcacggcaggaagctggttaccatcattgatccgcacatcaagaataccgacaattaccccgtcgtggcagagctaaagtccaaggaactcggcgtaaagaacaaagatggcaacctcttcgagggctggtgctggccaggctcgtctcactggatcgacgccttcagtccggctgcgcgcgagtggtggtcgtcgcttttcaagtatgacaaattcaagggcaccatggaaaacacgtggatctggaacgacatgaacgagccgtcggtctttaacggtcccgaaaccacgatgcccaaggacaacctccacgacggaaactgggaacaccgcgacgtgcacaacctgaatggcctgacgttccacaacgcgacctaccatgcgctcctcacccggaagcccggcgagctccgccgcccgttcgtgctgacccggtccttctttgccggctcgcagcgggtcggcgccatgtggaccggcgacaaccaggctgcctgggaccacctcaaggcatcgattcccatggtcctcagccagggtatttcgggcttccccttctcgggcgccgacgtcggcggcttctttggcaacccggagaaggagcttttgacgcggtggtaccaagccggcgccttctaccccttcttccgggggcacgcgcacattgatgcgcgacgccgcgagccatacctcgccggcgagccgtacacgaccatcatcgccgcggcgcttcggctgcgctacagcctgctgccgtcgtggtacactgcgttccggcacgcccatctggacggtacgcccattatcaagcccatgttctacacgcatccgtccgaggaggccggcctcgctatcgaggaccagttcttcgtcggcaacacgggcctgctcgccaagcccgtcacggagaaggagaagacgacggtcgatgtgtggatccccgacggcgaggtctactatgactactttacgtaccaggtcatcccgacagtcaagggcaagacggtcacgctggatgcgccgatggagaagatcccgctgctgatgcgcggcgggcacgtgtttgcgcgccgcgacgtgccgcggcgctcgagcgcgctcatgcgctgggacgactacacgctcgtcgtgacggtgccgcgggaaaacaaggtcgccgagggcgacctgtacgtcgacgacggagactcgtttgagtaccagaacggccagtacatccaccgccggttcgtctacgacggcgcggccaagagcctcagctcggtggatgccgagggccgcgacgcggcctcgatccgggagggcgcgtggatgaagcagatgcgctccgtgggcgtgggcaagatcgtggtggtcggcgcgccggccagctgggcgggcaagaagagcgtcaaggtagagagcgagggcaaggtctgggaggccaggatggagtttacgcctgctgggcagggcagagccgcgttcgcggtgatcaagaaggtgggcgtgaggatcggggcggattggaaggtcgagttttga

SEQ ID NO: 396 - protein, 982 aa, Myceliophthora thermophilia
MHVPGPLSSRWTAYLGLLSAFSAAFAPAVAVKEHDFKKCHQSGFCKRNREFADHALATSSWASPYNVAPDSGSFKDGQYQAVILKTTNSGETVRLPITVSFLESGTARVTVDEEKRQKGEIELRHGSKARKERYNEAEKWAIVGGMTLDKEAKVDYEDKTQITVKYGPTSKFEATIKFSPFSIDFKRDGISHVKLNDQGLLNIEHWRPKVDKPEPEKKDGDSTEENKAEEAKEEPKGEDESTWWEETFGGNTDTKPRGPESVGLDISFVGYEHVYGIPSHASSLSLKQTRGGEGNYQEPYRMYNADVFEYILDSPMTLYGSIPFMQAHRKDSSVGVFWLNAAETWVDITKAKDSKNPLSLGGKARTNTHTHWFSESGLLDVFVFLGPTPKDLTARYGELTGTTAMPQEFALGYHQCRWNYVSDEDVRDVDRKMDKFKMPYDVIWLDIEYTDEKKYFTWDKHSFTDPIGMGKQLDSHGRKLVTIIDPHIKNTDNYPVVAELKSKELGVKNKDGNLFEGWCWPGSSHWIDAFSPAAREWWSSLFKYDKFKGTMENTWIWNDMNEPSVFNGPETTMPKDNLHDGNWEHRDVHNLNGLTFHNATYHALLTRKPGELRRPFVLTRSFFAGSQRVGAMWTGDNQAAWDHLKASIPMVLSQGISGFPFSGADVGGFFGNPEKELLTRWYQAGAFYPFFRGHAHIDARRREPYLAGEPYTTIIAAALRLRYSLLPSWYTAFRHAHLDGTPIIKPMFYTHPSEEAGLAIEDQFFVGNTGLLAKPVTEKEKTTVDVWIPDGEVYYDYFTYQVIPTVKGKTVTLDAPMEKIPLLMRGGHVFARRDVPRRSSALMRWDDYTLVVTVPRENKVAEGDLYVDDGDSFEYQNGQYIHRRFVYDGAAKSLSSVDAEGRDAASIREGAWMKQMRSVGVGKIVVVGAPASWAGKKSVKVESEGKVWEARMEFTPAGQGRAAFAVIKKVGVRIGADWKVEF

SEQ ID NO: 397 - DNA, 3405 bp, Myceliophthora thermophilia
  CDS (1)...(3405)
atgggtcagacgtgctcgtacattctcgtccagccgggcgacggatgtgacaccttggccgcccgctgcggcatcactggcgctcagttcaccgagtacaacccgagccctacgttgtgttcgacacttcagcccaggcaacccgtctgctgttcggcgggctcggtccccgacctcactcccaagcccaatgaggacggcacctgtgccacgcaccttgtggtcccgggcgacgactgctgggccatcgccgacaagaactacatcaccgtcgacaacatcgagcactggaacttgaagacttggggttgggaaggctgtgccggcctgaaggagggccccatatgcatcagcaccggcgacccgcccatgcctgcgcccgtcgaggacaccttctgcggtccgcaggtccccggcacagcgcggccgagttcgtgggaccagatcagctctctcaacccgtgccctctcaacgcatgctgcaacaaatggggccagtgcggcatcacgcccgacttctgcacgcccagcgagtctagcaccggagccccgggaacgtcggcgccaggccaaaacggctgcatctcgaattgcggcactgacattgtgaacaatggctcgcccggcggctctatgcgcattggctacttcgaggcctttggcgtggacagggcctgcctaaccatggatgcgtatgccattccgtcgggttatactcacatgcactacgcgtttggtgacatcactgccgactatcaggtcgacctctcgcagtaccagacccagtgggaaagatttgccgccatgaggagcttcaaacgcatcctgtcgttcggcggttggtcgttttccacaaatgtggactcgtatcccatcttccgggagggcgtgaccgaggcaaatcggctgagatttgcgcagagcgttgtcgacacggtcaaacggtacaacctggacggggtcgactttgactgggagtacccgggtgcagacatcccgggagtcccaatcggcagtcccaacgacggcccgaactacctcgccttcctcaagacggtccgggccctcttgccgacgggcgtctccctgtccattgcagcgcccgcctcgtactggtacctcaagggcttccccatcgcggaaatggccgaggtcctcgactacattgtctacatgacgtacgatctccacggccagtgggactacaacaacacttgggccaacccgggctgtcccctgggcaactgcctccgctcgcacatcaacctgaccgagaccgagtatgcgctcgccatgatcaccaaggccgacgtccccgcgagcaagatcgctgtgggcatcgccggctacggacggagctttggcctggcagacccgggttgcaccgggccccactgtctcttcacggggccggaatcgacggccgagcaagggccctgcacgggcaccgccggctacatcgcgcaggccgagctcgactccctggtgtcggggggcgccgccaccagcgggctggcgcgccgcggcgccgtcaggacgtggtacgacagcagcagcgactcggacatcatgacctacggcggcggcacgtgggtgtcgtacatgagccacgccaccaaggcgtcgcgcatcagccggtacgccagttacggcttcgccggctcggtcgagtgggccgtggacctggcgcagtttgtcctcggccaggacgagcacagccccggcttgtcggtcgcccagaaggagagcgagttcaatgacgcgctagcgctcagcaactatgacacgtcgctgttcgccgactacaacttcaccgacctggcgacgaggctggagagcttcaggggctgcaatggcgcacagcggcgggccatctactcgggctggcagcagtcgtggaagatcatgaacctgatactctccgagacgaagaatggcctcgacctcaactcggcggctgcgctggagtacctgggtccgccggctgacagcgggtccaagaaatccgcctttgagacgatcttcaggactcatgccacgatccagccgggctacatcaccaccccgttcgactggcggctgccggtccggtgtgacgatccaagcaacctatgtccatgcggtaagcccagcaacacggccgcctacacgatgctccccggggaagacccgactttcaacgggcggcagagcatcaacttctgcccgctgtatttcgcttcaccgacgctcgacagcgcgatgcagtacgccaacaaagacgagtggccggctgatatatacgctgatgtgaccaagtactaccccaatcagggcaggacctggtaccacgagctgatgcatgttgactgggccacaggtgcgtcgccgcaaggggtgccaaccggcgtagtccacatcacggacctgatgatgggctacaagttccgcgacgacgacgaggggattggttggacctgggttcacgcgtacggtgtcacaaacgtgaaggcgctggcacgcgtctacctcagcagtttccacgttgtccgaaacgcagacagtctaaccctgtatgccctagccaggtacatccaaaaggcactcaacaacgtttacccgcatctgcccttggctggaaacccgccgaacagggtcaaaggcaagttcgaggtcatcggctacttcaccgtcgactccgacggcacggcggtgctggcgcccggccgagagtgggagagcccggagcccaattgggcggccaatggtacggatgacacatgcagcggtttgagcgacgtcggcggcgacaggggtcctgacaacgctgctgtcacgctcacggccggctgggccacgcagtcggattaccccgccgactacctctcgagttactcgtccactgctcccgcagacccgtcgcccacccccaacctgacgccgctgacgcgaggtcgtatcgactgcttcaacgaggccgactttccgggccacgccgacatccagtcggattaccaggacacgttctcggtcgagtttagcagcctcgacatcaccatcgggccgggcgacgcgccgatcccgctccgccgcacggaccgctacggcgtcaattacgactaccgcgtcgagtgggttgccgggtgtgtcaccacggtcgagaggcagagcttccgtttcccgctgggcatgtcgcagagcctgatcacggcttacttgcttgtgagggaggattataccaagtgcaataacggcggtgtcggtggctcgtgtcaggttggctgtttgttgtacacctttgagggtgggcgaggtgatcaaggccgcttccggatgccagttgcgccgtcacagtatccccccagtaatcatagtcactacgtgccgggggagaatggcgggattgttatcgatgatctgaagtag

SEQ ID NO: 398 - protein, 1134 aa, Myceliophthora thermophilia
MGQTCSYILVQPGDGCDTLAARCGITGAQFTEYNPSPTLCSTLQPRQPVCCSAGSVPDLTPKPNEDGTCATHLVVPGDDCWAIADKNYITVDNIEHWNLKTWGWEGCAGLKEGPICISTGDPPMPAPVEDTFCGPQVPGTARPSSWDQISSLNPCPLNACCNKWGQCGITPDFCTPSESSTGAPGTSAPGQNGCISNCGTDIVNNGSPGGSMRIGYFEAFGVDRACLTMDAYAIPSGYTHMHYAFGDITADYQVDLSQYQTQWERFAAMRSFKRILSFGGWSFSTNVDSYPIFREGVTEANRLRFAQSVVDTVKRYNLDGVDFDWEYPGADIPGVPIGSPNDGPNYLAFLKTVRALLPTGVSLSIAAPASYWYLKGFPIAEMAEVLDYIVYMTYDLHGQWDYNNTWANPGCPLGNCLRSHINLTETEYALAMITKADVPASKIAVGIAGYGRSFGLADPGCTGPHCLFTGPESTAEQGPCTGTAGYIAQAELDSLVSGGAATSGLARRGAVRTWYDSSSDSDIMTYGGGTWVSYMSHATKASRISRYASYGFAGSVEWAVDLAQFVLGQDEHSPGLSVAQKESEFNDALALSNYDTSLFADYNFTDLATRLESFRGCNGAQRRAIYSGWQQSWKIMNLILSETKNGLDLNSAAALEYLGPPADSGSKKSAFETIFRTHATIQPGYITTPFDWRLPVRCDDPSNLCPCGKPSNTAAYTMLPGEDPTFNGRQSINFCPLYFASPTLDSAMQYANKDEWPADIYADVTKYYPNQGRTWYHELMHVDWATGASPQGVPTGVVHITDLMMGYKFRDDDEGIGWTWVHAYGVTNVKALARVYLSSFHVVRNADSLTLYALARYIQKALNNVYPHLPLAGNPPNRVKGKFEVIGYFTVDSDGTAVLAPGREWESPEPNWAANGTDDTCSGLSDVGGDRGPDNAAVTLTAGWATQSDYPADYLSSYSSTAPADPSPTPNLTPLTRGRIDCFNEADFPGHADIQSDYQDTFSVEFSSLDITIGPGDAPIPLRRTDRYGVNYDYRVEWVAGCVTTVERQSFRFPLGMSQSLITAYLLVREDYTKCNNGGVGGSCQVGCLLYTFEGGRGDQGRFRMPVAPSQYPPSNHSHYVPGENGGIVIDDLK

SEQ ID NO: 399 - DNA, 1308 bp, Myceliophthora thermophilia
  CDS (1)...(1308)
atggccgcctctttggcattcctgcagatccgggcggctagggaggtctttgctcacgtaattgtgggcaacgtgcccgagttcacgctggccgactgggaggaggacatgcggctggcgcaggaggccaagatcgacgggttcgcgctcaacattgcggccgaagacccgtccatcgaggcgtcgctggagctggcgttcgaggcggccggcgagcgcgacggcttctcgctcttcttctcgttcgactacctggcgcagggcccgtggccggccgagcgcgtgacggagctggtgaaaaagtacggcgcgagcgagtcctacttcaagccggacggccggcgcccgttcgtgtccacttttgagggcccctcgaacgcggacgactggcggaacatcaaggcggcggtcgacgtcttcttcgtgccggattggtcctccattccggcaaaggaggcggtcgcggcggcggggggcgtggcggacgggctgttcagcttcgacgcttggcccgatggggcggccaacatgacgaccgagggcgacgatgcattccgggcggcgctcggcgacgacaaggcgtacatgatgccggtggcgccctggttctacaccaacctgcccgggtttgggggcaagaactggctgtggcgcggtgacggcctgtgggacgcgcggtggcggcaggtggccgaggtgcggccagatttcgtcgagatcctgacgtggaacgactttggcgagtcacactacgtcggccccgtgcgcgacagggagctgggcctgtttgagagcgccgacgcgcccctcaattacgcccgcggcatgacccacgacggctggcgccggttcctgcccttctacatcgacgtctacaagacgggcaaggtgcccgaccgggtcggcgaggaaggggttatggcctactaccgcaccgcaccggcgctggcctgccccgccggcggcacgacgggcaacaacaaggcgcagggccaggccgagctgccgccggaggagctggtcgagaacagcgtcttctacgcggccctgctcgactcggacgacggcgtcgcggtcgaggtgtccatcggcggcaagaagctgcccgggcggttcggcaccgtgcccgccgccgggccggggacgccgggcgtgtacacgggcagcgcgccgttcggcggcaacacgggcgaggtcgtcgtcacggtgtcgagggacggtaagacgatcgccacggtcgagggcggcaaggacatctccaacgagtgcgagaacaatgtgcagaactggaacgctgtcgctgtgtag

SEQ ID NO: 400 - protein, 435 aa, Myceliophthora thermophilia
MAASLAFLQIRAAREVFAHVIVGNVPEFTLADWEEDMRLAQEAKIDGFALNIAAEDPSIEASLELAFEAAGERDGFSLFFSFDYLAQGPWPAERVTELVKKYGASESYFKPDGRRPFVSTFEGPSNADDWRNIKAAVDVFFVPDWSSIPAKEAVAAAGGVADGLFSFDAWPDGAANMTTEGDDAFRAALGDDKAYMMPVAPWFYTNLPGFGGKNWLWRGDGLWDARWRQVAEVRPDFVEILTWNDFGESHYVGPVRDRELGLFESADAPLNYARGMTHDGWRRFLPFYIDVYKTGKVPDRVGEEGVMAYYRTAPALACPAGGTTGNNKAQGQAELPPEELVENSVFYAALLDSDDGVAVEVSIGGKKLPGRFGTVPAAGPGTPGVYTGSAPFGGNTGEVVVTVSRDGKTIATVEGGKDISNECENNVQNWNAVAV

SEQ ID NO: 401 - DNA, 1371 bp, Myceliophthora thermophilia
  CDS (1)...(1371)
atggcgccgacaacaactgtgctgctaggcgcgcttctgcttgcatcaagcagcgtgaatgcacagcaggccaagctgcaggtcaaccttaattctgctgagtcgatcaagtcggccgcgaagattgtcgcaaagaacctgtattcctactaccacgggaatgagcccggccagactcccggtatcctacccgggccgcccccgggcggtccctactactggtggcaggccggcgccatgtgggggacctacatcgactactggttctacacgggcgatgacacctacaacgccgagacgacgcggtctttgttgttccaagccgaaccgcctgctaacgcctacatgccaaagaactggaccgcctcgctgggaaacgacgaccaaggtttctggggtatggccgcgatgctagccgccgaagtgaacttcccgaacccacccaaggatcaaccgcaatggctcgctctggcccaggccgtgttcaacacccaggcacctcgttgtgtccacaaatggcggctacgactacaaaacaccattgccaacgccgtcttcatgaacatcgccgcgcgcctggcccgctacaccaacaacgatacctacgcgctctgggccaccaaggcgtgggactggatcgaggcgatgggctacgtcacagacaagtatgacgtcctcgacggcgcccacattgggcacaactgcaccgatctcaaccccgtccagttctcggctaatgccgccatgctcatccacgcaaccgccgtcatgtacaactataccactggcgaaactcgtgccaaatggcgacgccacgtcgccgggcttctcaaccacaccatcgaccacttcttccccgagggcatcatggtcgagcgggcctgcgagctcgaagaccgggtccagtgcaacacggaccagcactccttcaagggctacatgcaccgggcgctggcgaccgtggccgtgctggctcccttcacgtacgagaccatcaccaagacgctccgcagctccaccgagggctgcgtctcgtcctgcctggccgacggcacctgcggcttccgctggaacacgggcgagtacgacggcgacacggccgccggccccgccggccaggagatgagcgccctcgccgccctgtccaccatgcttctcgaacaggagaaggtgctcaagggccccctgaccaacaccacgggcggcaccagccagggcgacccgaacgcggggcagaagttcgagggcgtgtcgccgccgagggagatcacggcgggcgaccgggccggcgccggtatcctcacggccgtggtgctggcgtcttttttggggagcctcgtgtggatgggcatgggttggtcggagaagtga

SEQ ID NO: 402 - protein, 456 aa, Myceliophthora thermophilia
MAPTTTVLLGALLLASSSVNAQQAKLQVNLNSAESIKSAAKIVAKNLYSYYHGNEPGQTPGILPGPPPGGPYYWWQAGAMWGTYIDYWFYTGDDTYNAETTRSLLFQAEPPANAYMPKNWTASLGNDDQGFWGMAAMLAAEVNFPNPPKDQPQWLALAQAVFNTQAPRCVHKWRLRLQNTIANAVFMNIAARLARYTNNDTYALWATKAWDWIEAMGYVTDKYDVLDGAHIGHNCTDLNPVQFSANAAMLIHATAVMYNYTTGETRAKWRRHVAGLLNHTIDHFFPEGIMVERACELEDRVQCNTDQHSFKGYMHRALATVAVLAPFTYETITKTLRSSTEGCVSSCLADGTCGFRWNTGEYDGDTAAGPAGQEMSALAALSTMLLEQEKVLKGPLTNTTGGTSQGDPNAGQKFEGVSPPREITAGDRAGAGILTAVVLASFLGSLVWMGMGWSEK

SEQ ID NO: 403 - DNA, 1605 bp, Myceliophthora thermophilia
  CDS (1)...(1605)
atgttgttcacggggtcttatatccgcccccacaccaacctgaccgagatctgtgaaggcctgtccctgctgtggcgcgccggcgtcagcccctccaaagtcgtcctcggcccgggttggtacgggtgcacccgctcctccggtaccctctccaacgccgagatcaagcgcgtcctggcctcgggagccggcaaggagtcgtacgacgccaccgccggcgtccgctggctgacctggaacacggaccagcgggtgagctacgacgacggtgtcaacgtgcagcagaagatcgccctggccaataacttgtgtctgggatgcatcatgatttgggcactggatcaggacgacgccaagggcagcagcaagaaggacctgctgggcactggcccggccaacggcatctcagaggaggcggccgaatcgtacatgaagcagctggcaaacgcgacgctgcagaaggccgtcgcctcgagctgctactggaccctgtgcggcggcggctcctgccggcgggagggcttccgcggcgtcggcttcccctgctcgcccgcctgcagcgacccagaggtcaccgtcgtcgcccgcaacaccaactcgtacacgaccaacgagaacggccaggcctattgttgcaccggcttcgtcccttcgtccctcaccaacacggccaacctgaccctctacggccagaactacaacgccatggttagcaagcgcgacagtgtcaacggcagcagcagcagcaggctcgccatccaggagcgtggcctctttcccccgcagcagcgcggtgcccccttgctcctcggcggcccggacgcgaccacaatcgggctgatggaagatgacaaacgaactgtatcacgggcctactcgcggtggcgcacccaccagcgccacgccgcctacggcttcgacttgcagacgtcgaactcgctctgctttgcctcgtatactttcactcgggtgccgggaaccatcgaaaacagcatgattgtcgatcatggcttccgcgttcttgacgatgaccccggcgtcgaggaccatgacagcggcgcgcagcagagcacaggatccggcttccgcatcaagctgaagtggttggccccttggacgacctcgatccggatccggtccccgcccacgagagcatcccagccattggcgcccagctgctcgggccggcgccgtctcagcaaccaggccatgttggccgggtcgtcgggacggatctcgatcgtctcttcctcgtcgaccccgttcgcgccccagacgatccacgtcggcaggctcctcctccgcgggccgccgccgcccccacccccaccccagggcaggaggtcgacggtgtcgagcatggaggagaagccggtgaagtgcgagagcagccaggcgggcggcggcttcctgccgggggcggtgccgaagatgccgcgccggacgaactcgtcgtacagccgcgccggcagccgcttgcgccctcccgggcgcgggctgtcgatcagcaccaggccggccacctcctcgccgtactggtcgcgcagccgctgcgcggcccggtacgcgcacaggccgccggccgaccagccgccgacgaggtag

SEQ ID NO: 404 - protein, 534 aa, Myceliophthora thermophilia
MLFTGSYIRPHTNLTEICEGLSLLWRAGVSPSKVVLGPGWYGCTRSSGTLSNAEIKRVLASGAGKESYDATAGVRWLTWNTDQRVSYDDGVNVQQKIALANNLCLGCIMIWALDQDDAKGSSKKDLLGTGPANGISEEAAESYMKQLANATLQKAVASSCYWTLCGGGSCRREGFRGVGFPCSPACSDPEVTVVARNTNSYTTNENGQAYCCTGFVPSSLTNTANLTLYGQNYNAMVSKRDSVNGSSSSRLAIQERGLFPPQQRGAPLLLGGPDATTIGLMEDDKRTVSRAYSRWRTHQRHAAYGFDLQTSNSLCFASYTFTRVPGTIENSMIVDHGFRVLDDDPGVEDHDSGAQQSTGSGFRIKLKWLAPWTTSIRIRSPPTRASQPLAPSCSGRRRLSNQAMLAGSSGRISIVSSSSTPFAPQTIHVGRLLLRGPPPPPPPPQGRRSTVSSMEEKPVKCESSQAGGGFLPGAVPKMPRRTNSSYSRAGSRLRPPGRGLSISTRPATSSPYWSRSRCAARYAHRPPADQPPTR

SEQ ID NO: 405 - DNA, 1182 bp, Myceliophthora thermophilia
  CDS (1)...(1182)
atgcgcttcctcaggtccctcaagcccgcacttgcgaccacggccgctattgcggccatcgctcccaaggatctagatatcaacgacccatcctcgatcaagggcgtggcaaaaaccatcgcctccggcgccatgtcctactactctggcaccgccgagaagtttgtcgacctccctgagccgtattactggtggcaggccggtgcgctcatggggagcatgctggactactcgcactatacgggcgacaagagctacgaccgcatcattgcgacggctctcctgggccaggtcggtccgaacttcgacttcatgcttccgtcacattttggccaggaagggaacgacgaccaggccttctggggatttgccgtcatggcggcggccgagaggaacttcccgcagccggacgagaatatcttcgcctcgaacccgaacggcctcgactacaagaacagcgtcagcaacggcggcctgttccagatctcggcccgcctcgcacgggcgacgggcaacaacacctacctggaatgggccgagaaggtctgggactggaccgagggcgtcggcatgatcgacaaagacttcaacgtgcacgacggcgcgagcgccagccacaactgcaccgacatcaacccagtcaccttctcgtacacggccgccatctacatgtacggcgcggccgtcatggccgatgtcacgggcgacaagaagtgggtgcagcgtaccgagcgcatcttggacgccgcccgttccttcttcagcccgttccccaacgccaccaacatcatgtacgagcacgcctgcgagcaggtcggcacgtgcaacgccgacatgcgcagcttcaagggctacctgtcgcgcttcgcgtacgcggcgagcgtgttcgtgccctcgatcaagccggtcatcgaggagctctggcatcccaccgcgaaggcggccgccaagtcctgctcgggcggcccggacggcacccagtgcgggcagaggtggtactacggcggcttcgacggcaccacgggcctgggagaggagatgtgcgcgctcgagacgatccagggactgctcgtcggcgaggcggagccgccgctcaagggcgaccagatcaagacggtccgcacttttgaaggctcgtcgaacaccaagcggggggggaggtacgatgctcgtcttgcgtag

SEQ ID NO: 406 - protein, 393 aa, Myceliophthora thermophilia
MRFLRSLKPALATTAAIAAIAPKDLDINDPSSIKGVAKTIASGAMSYYSGTAEKFVDLPEPYYWWQAGALMGSMLDYSHYTGDKSYDRIIATALLGQVGPNFDFMLPSHFGQEGNDDQAFWGFAVMAAAERNFPQPDENIFASNPNGLDYKNSVSNGGLFQISARLARATGNNTYLEWAEKVWDWTEGVGMIDKDFNVHDGASASHNCTDINPVTFSYTAAIYMYGAAVMADVTGDKKWVQRTERILDAARSFFSPFPNATNIMYEHACEQVGTCNADMRSFKGYLSRFAYAASVFVPSIKPVIEELWHPTAKAAAKSCSGGPDGTQCGQRWYYGGFDGTTGLGEEMCALETIQGLLVGEAEPPLKGDQIKTVRTFEGSSNTKRGGRYDARLA

SEQ ID NO: 407 - DNA, 2919 bp, Myceliophthora thermophilia
  CDS (1)...(2919)
atggctttgcttgcctcgacatctctccttctcgctgggctctatctgcgcacgacttcgagtgttcaaatctctgaaacacctagccaagccgctggtcatcctcccgtgttcacactccccccttcggctgaccggggcaaaaacatcctccccaacatcaaggaccccaaggccatcgaccctcagacagtatgtccgggctacaaggcatccaacctgcaagacaccaaggacggcttcaccgcggatcttgaccttgccggcccggcatgcaatgtttatggaactgacgtcgagcatttggccttgtctgtcgagttccagggcgatgatcgggttcacgtcgaaatccggccgcgttacattacccctgggaatgaaacttggtttcttcttccggaggagctggtcccaaggccgtcggcgaggcaggcgtatactcctggcccaaacgacctgaccgtttcatggtctaacgatccaagcttctcctttaccgtaaagcgtggggcaatcggcgacaccctcttttccaccgaaggaaagagactcgtatacgaggaccagttcattgagttcatctctacactccccgaagactacaacctttatggtctcggcgaggtcattcacggattccgcctgggaaacaatctcactaggactcttttcgccgccgacgttgctgacacaattgatgccaacatctacggtagccacccggtctaccttgacacgagatacttcacagttgacgagtcaggcaagcttacttatgtcgccaatgcaaaggacatggctgcgaagtatgtctcgtatacgcatggcgtattcctccggaacgcccatgcccaggagattcttttgcaatcgtccggcatcacatggaggacgacgggggggagcatcgacctgtacttctatagtggcccaaaggcagaggacgtgataaggtcgtaccagcagtcgacaaccggactgccagctatgcagcggtactggacgcttggtttccatcagtgtcgctggggttatgacagctgggcggtgctacaggaggtggtcgacaactttgccaagtttgagattcccgtggaaaccgtctggtccgacatcgactatatgaagcaataccgcgactttgagaacgaccccgtgcggttcggctacgaggaaggggctcggttcctggcccagcttcacgcaaatcaccaacactacgttcccatagtggactccgccatatacgcccctaatcccgagaatcccggagatgcgtatcctccatatgatcgcggagttgaagcgaacgcattcatgatgaatcccgatgggtccatctactacggcgccgtgtggcccggctatactgtattccctgactgggtgggcgctgttctgaacggcagtggcgctattgactggtggatcgacgagctttcccggtggtctgagaaggttgcttttgatggattatggatcgacatgtcggaagttgcctccttttgtgttggcagctgcggcaccggtaacttgacgctgaacccggtccacccaccattcggacttccgggagaggctggaaatcttgtcttgcaataccctgaaggcttcgagctcaccaattcatcggaagctgtttcggcgtcgtctgctctcagtacgcaagaggctgcttccccgacgacggcgagcccgacgtcttccttttaccgcaccacgcctactccgggagtgcgcaacgtggattggccgccctatgccatcaacaacatccacggcgacttggcggtccatgctgtcagcccaaacgctacacatcatggcggttacctcgagtacgactttcacaacatgttcggacaccagattctcaacgccacctatcgtgccctgctcaaaatacacgagggaaagcggccctttatcatagggcgcagcaccttcgccgggtctggcaaatgggccgggcactggggaggcgacaacgcggcgctgtgggcatacatgtactttagcatcccacaggcgctgtccttctcgctctttggcgtgcccatgtttggtgtcgacacgtgcgggttcggcggcaacagcaattacgaactgtgctcccgctggatgcagctcagcgccttcttccccttctaccgcaaccataacatcctgggcgctatcccgcaggaaccctatgtctgggccagcgtcatcgacgccacaaaaaccgccatgcgcatccgttacgccttgctgccgtacctgtacacgctcatggctcgcgccagcctcgaggggagcaccgtcatgcgcgcgctggcgtgggagttccccgacgagccgtggctggccgacgccgatcggcagttcatgctcggcagagccatcatggtgactccctgcctggaacagggcgccagcaccgtgaggggcgtatttcccggcgtcggagacggcggcaagaagaccgtctggtacgactggtacacggggaaggcggtaacggacgagatcaaaccgggacagaacgtcaccatcgaggcgccacttggtcacatccctgtctacttgcgcggtggcagtgtggttcctgttcagggacccgggatgacgacgacggagagccggagaaacccgtggggtctgattgtggcgcttgatcgggagggtttcgcggagggagagctttatcttgacgatgccgttcctcaaggcgactacgtcgacaacaacacgtttggcaacgccaccgtcatgggcttggctaagggccccgtgcggatgtggctgaacaggcgcgtgctcgaccatgcgaactggcagtatgaccaggatagggcagtgctgttgctgtatgggttgaatcatctgttcccccagggtgcgtggacggataaatgggagattaactgggagtaa

SEQ ID NO: 408 - protein, 972 aa, Myceliophthora thermophilia
MALLASTSLLLAGLYLRTTSSVQISETPSQAAGHPPVFTLPPSADRGKNILPNIKDPKAIDPQTVCPGYKASNLQDTKDGFTADLDLAGPACNVYGTDVEHLALSVEFQGDDRVHVEIRPRYITPGNETWFLLPEELVPRPSARQAYTPGPNDLTVSWSNDPSFSFTVKRGAIGDTLFSTEGKRLVYEDQFIEFISTLPEDYNLYGLGEVIHGFRLGNNLTRTLFAADVADTIDANIYGSHPVYLDTRYFTVDESGKLTYVANAKDMAAKYVSYTHGVFLRNAHAQEILLQSSGITWRTTGGSIDLYFYSGPKAEDVIRSYQQSTTGLPAMQRYWTLGFHQCRWGYDSWAVLQEVVDNFAKFEIPVETVWSDIDYMKQYRDFENDPVRFGYEEGARFLAQLHANHQHYVPIVDSAIYAPNPENPGDAYPPYDRGVEANAFMMNPDGSIYYGAVWPGYTVFPDWVGAVLNGSGAIDWWIDELSRWSEKVAFDGLWIDMSEVASFCVGSCGTGNLTLNPVHPPFGLPGEAGNLVLQYPEGFELTNSSEAVSASSALSTQEAASPTTASPTSSFYRTTPTPGVRNVDWPPYAINNIHGDLAVHAVSPNATHHGGYLEYDFHNMFGHQILNATYRALLKIHEGKRPFIIGRSTFAGSGKWAGHWGGDNAALWAYMYFSIPQALSFSLFGVPMFGVDTCGFGGNSNYELCSRWMQLSAFFPFYRNHNILGAIPQEPYVWASVIDATKTAMRIRYALLPYLYTLMARASLEGSTVMRALAWEFPDEPWLADADRQFMLGRAIMVTPCLEQGASTVRGVFPGVGDGGKKTVWYDWYTGKAVTDEIKPGQNVTIEAPLGHIPVYLRGGSVVPVQGPGMTTTESRRNPWGLIVALDREGFAEGELYLDDAVPQGDYVDNNTFGNATVMGLAKGPVRMWLNRRVLDHANWQYDQDRAVLLLYGLNHLFPQGAWTDKWEINWE

SEQ ID NO: 409 - DNA, 2613 bp, Myceliophthora thermophilia
  CDS (1)...(2613)
atgagagaggcaacaggaacggcacgcctgtttcacaggctcagtaccatactgctaacatttttgttggttccgcgtctcgttggagcgagaccctaccccgtccattgggcagatgataataacggccgccaacgcatcagtctcaacgagggctggaagttttcacgtttcacttcgaatccggactcgctctcgtacgactctctaaagtggtggatcctgccatccgccaataacttcatcaagggtgacaagcaccagcccccgtccggaacaccccccggcagcaatgttcagtatgtgcaaccggattttgacgaccgcgactgggagtccgttgacctgccgcacgactgggccatcaaggggccgttcaacgctcccggcgtgagcggaggcatggggcgcctgccctcgaacggcgtgggatggtaccgtcggacgttgaccagatcccccgaggacgaagacaagtccatcttcctcgacattgacggtgccatgtcgtatgccgccgtctggctcaacggccgtttgatcggtgggtggccgtacgggtacgcctcattccgcctcgatctcacgccctacctggacggcggcgacaacctgcttgctatccggctggagaacgcgctagacaactcgcgatggtcaacccgacccatgtcggccattttttggacgtacatcaccacgtcggacgtgtcggaggagaaggccaccgtccacctcacggtcgatgtggagaacggcggtgcatccgacacgacggtagacgtggtaacggaaatccacctgcttgacccggctacggggactcccggagaagaggtcgtggcgcagttcgagaaagccacggtagccgtgccggccggggggaagatgtcggtcagcggctcgacagcggtgaggaacccgctgctctggggtcccccgcccgagcaagagccgaacctgtacgtcgcgacgaccaggttgacggtcaacggcaccgtcatagacacctacgagacccccttcggtatccgctccgtcaccttcgacgcgaaccagggcgtgtcggtcaacggcaagccggtcaagatctggggcacgtgcaaccacggcgacctcggctcgctcgggacggccttgaacacccgcgccctggagcggcagctggaggcgctccgagagatggggagcaacgcgctccgcacctcccacaaccccccggccccggagttcctcgacctggccgaccggatgggcttcctggtgctggacgagatcttcgacacgtgggcggaccggaagacgaccaacgacttccacgccatctttccggactggcacgagcccgacctgcgcgcctttgtccgccgcgaccgcaaccacccgtccatcatcgcgtggtcctacggcaacgagatccccaaccagtccggctcggccacgggcgcgaccgcccaggccctccacggcatcctcgtcgaggaggacccgacccggccgtccacctgcgccatgaactcggcggggcccggcagcccgctggccgacgcgctcgacatctacacctacgagactcccttcggtatccgcttcgtcgccttctacgcgggccaggtcgtgtgggtcagcgggaagcgggtcgagctctggggcacgtgcggccacggctacctcgtctcgctccggcggctggaggcgctccgagagatggggagcgacgggctgcgcacctcccgggtgcgcgcgtccccggagttgctcgacctggccgaccggctggggttcgtggtgctggacgaggtgttcgacacgtgggcggacgggcagacgacctacgtcttccgcgcgatctttccgtactggcacgagccggacctgcgcgcctttgtgggccgcgaccgcaaccacccgtccgtcatcgcgtggtcgtacggcgcgcggagctcctacttcggcatcatcgacctcgccggcttcaggaaggaccgcttctacctctaccaggcccgctggcggcccgacctgcccatggcccacctgctgccgcactggacctggcccgaccgcgtcggccaggtcacgcccgtgcacgtcttctcgtccggcgacgaggccgagctgttcgtcaacggcaagtcggcggggcggcagaagcgcggccggggccagtaccggttccggtgggacgacgttgtgtaccagccgggcaacgtcagcgtggtcgtgtacaaggacggcgaggagtgggcgcgggacgccaggtggacggtcgggaaagccaaggggctgaccctgacggccgaccgggccgagatcaggggggacggccgcgacctgtcgttcgtcaccgtggccgtcgtcgacgagaacggcgacacggtgcccgaggccggcaacgccatcgcgttttccgtctccggtcccggccggatcgtcgcgaccgacaacggagacccggccgacatgaccgagttcccgtcccttacccggaaggccttcagcggtctcgcgctggcgatcgttcgggcggataagggcgcttccggagacatcaccgtcacggcttccgccgagggtctcgagacggcggaggtggtgatacgagctgcttaa

SEQ ID NO: 410 - protein, 870 aa, Myceliophthora thermophilia
MREATGTARLFHRLSTILLTFLLVPRLVGARPYPVHWADDNNGRQRISLNEGWKFSRFTSNPDSLSYDSLKWWILPSANNFIKGDKHQPPSGTPPGSNVQYVQPDFDDRDWESVDLPHDWAIKGPFNAPGVSGGMGRLPSNGVGWYRRTLTRSPEDEDKSIFLDIDGAMSYAAVWLNGRLIGGWPYGYASFRLDLTPYLDGGDNLLAIRLENALDNSRWSTRPMSAIFWTYITTSDVSEEKATVHLTVDVENGGASDTTVDVVTEIHLLDPATGTPGEEVVAQFEKATVAVPAGGKMSVSGSTAVRNPLLWGPPPEQEPNLYVATTRLTVNGTVIDTYETPFGIRSVTFDANQGVSVNGKPVKIWGTCNHGDLGSLGTALNTRALERQLEALREMGSNALRTSHNPPAPEFLDLADRMGFLVLDEIFDTWADRKTTNDFHAIFPDWHEPDLRAFVRRDRNHPSIIAWSYGNEIPNQSGSATGATAQALHGILVEEDPTRPSTCAMNSAGPGSPLADALDIYTYETPFGIRFVAFYAGQVVWVSGKRVELWGTCGHGYLVSLRRLEALREMGSDGLRTSRVRASPELLDLADRLGFVVLDEVFDTWADGQTTYVFRAIFPYWHEPDLRAFVGRDRNHPSVIAWSYGARSSYFGIIDLAGFRKDRFYLYQARWRPDLPMAHLLPHWTWPDRVGQVTPVHVFSSGDEAELFVNGKSAGRQKRGRGQYRFRWDDVVYQPGNVSVVVYKDGEEWARDARWTVGKAKGLTLTADRAEIRGDGRDLSFVTVAVVDENGDTVPEAGNAIAFSVSGPGRIVATDNGDPADMTEFPSLTRKAFSGLALAIVRADKGASGDITVTASAEGLETAEVVIRAA

SEQ ID NO: 411 - DNA, 1011 bp, Myceliophthora thermophilia
  CDS (1)...(1011)
atgacgaaatgcacgccaggaactgcatggcttgcctgtggcacgggcgaccacccgctgacggcgagctgggtggaaaaggggctcatcaagaccaactgggacaccttttcgctcgacacatccacctttgtcgccaacggcacgcgctacctggtctgggcgcaacaggagccgtcgcggcctgacgagaactcgagcatcatgatcgcgccccctcgagaacccctggacgatcggcggcacggccgttgccatctcccgcccaaccctgccgtgggagctgccagtgcgacggactccaactactgcatgggcatgccgacggcgacggagggatcggacctgctgaacccggcctcatggagcaaatcgcagaaccccatcttcgccagcaatccaaagaccaatcaatggggaccgggtcacaacttgtttgttgtgtcggaggacgggttaagcgacatcctagtgtatcatgaccgcgggtacaaggatatccgaggcgacccgctcaatgatccgaaccggcggacaaggatgcagaagctgtactggaaggaggacggaacgccagactttggggtgcccgtgccggaagggaacacaccagtgcggctgcggtcagccgcagggttgggccaggacgtgaggtactacacgggcagcgacggtccgacggacacgccggcgctggctgatacccagtttcgtatcgccagtcccgggttggcgggcgggagtatggtcagcctggagtcgacgagcaacccgggcatgtttgtgcgccgggcggacgatggaagtgcgcagtttgtaagcagcgatgcgctgggctcggcttctgccaaagcatcggccagcttcaacctcgtccccgggttggccgacgtctcgttcgaagcgtcggatgcgagtgaccagtatcttcggttggaagcaagcggacgactcacgacggtacaggctggggaggatgctcaggagcaggcaaccttctttttggagtag

SEQ ID NO: 412 - protein, 336 aa, Myceliophthora thermophilia
MTKCTPGTAWLACGTGDHPLTASWVEKGLIKTNWDTFSLDTSTFVANGTRYLVWAQQEPSRPDENSSIMIAPPREPLDDRRHGRCHLPPNPAVGAASATDSNYCMGMPTATEGSDLLNPASWSKSQNPIFASNPKTNQWGPGHNLFVVSEDGLSDILVYHDRGYKDIRGDPLNDPNRRTRMQKLYWKEDGTPDFGVPVPEGNTPVRLRSAAGLGQDVRYYTGSDGPTDTPALADTQFRIASPGLAGGSMVSLESTSNPGMFVRRADDGSAQFVSSDALGSASAKASASFNLVPGLADVSFEASDASDQYLRLEASGRLTTVQAGEDAQEQATFFLE

SEQ ID NO: 413 - DNA, 1161 bp, Myceliophthora thermophilia
  CDS (1)...(1161)
atgaggccgaccagtccggtcatctcggcatacgagatggcgggttactcatcgtccccgtcgcggtggaagccggccagctggacgagaaggatatggctgatcgtcggcacagtcgtcgtgctgatcgtggtcgtggtcgttggcgccgtcgtgggcgtgaaggcgacgaggaacaatggcggcggaaactcgagctatcccgactacttcaagctgaactacaccctgattgatacctattcggggactaccttctttgacaagttcaactacttccacacttgggaccctgccgggggatttgtccactacgtcgatccggactatgccggcacatataacctcacctgggcaacgtcttccaccgccctgatccgcgtcgacaccactgtcggaccgggttccgagccggacgcctccaccggccgcttctcggtccgtctcgagtccaagacgcagtacggcccgggactgttcctcttcgacgtcaagcacaccccgtacgggtgtgctacatggccagccctctggctcaccgaccccaacaactggcccgacaacggcgagatcgacgtgatggaggccgtcaaccaagccgcggcgggcaccctcgtcgccctgcacaccaccgccggctgcaccatggccgacgtccggcgcgacatggccggcgccgccgagcaggcggactgccacaacgccaccaactccaacgccggctgcgccgtccggggcgcccccgccacctacggccccgagttcaacgaggccggcggcggcatcgtcgcgctcgagtggcgcgccgagggcatccgcgtctgggtgttcccgagaggcggaagcggaagcggaagcggcggcggtgacgagagagggctggcggcgctgccggccgccgaggccaaagagaccccggacccgagcgcctggggcccgccgctggccgacttcccggcgaccagctgcgatgtgggcagccacttccggaaccagagcatcattatcaatatcgacctgtgtggctatctgaccgaggcggtatgggaggagtctgggtgtagtcgtctgaagtgcatcgatttcgtccccaacaacccttcggcgttcaccaacgcgtattgggagtttggcgcctttcaagtctataaggcgcaatga

SEQ ID NO: 414 - protein, 386 aa, Myceliophthora thermophilia
MRPTSPVISAYEMAGYSSSPSRWKPASWTRRIWLIVGTVVVLIVVVVVGAVVGVKATRNNGGGNSSYPDYFKLNYTLIDTYSGTTFFDKFNYFHTWDPAGGFVHYVDPDYAGTYNLTWATSSTALIRVDTTVGPGSEPDASTGRFSVRLESKTQYGPGLFLFDVKHTPYGCATWPALWLTDPNNWPDNGEIDVMEAVNQAAAGTLVALHTTAGCTMADVRRDMAGAAEQADCHNATNSNAGCAVRGAPATYGPEFNEAGGGIVALEWRAEGIRVWVFPRGGSGSGSGGGDERGLAALPAAEAKETPDPSAWGPPLADFPATSCDVGSHFRNQSIIINIDLCGYLTEAVWEESGCSRLKCIDFVPNNPSAFTNAYWEFGAFQVYKAQ

SEQ ID NO: 415 - DNA, 2466 bp, Myceliophthora thermophilia
  CDS (1)...(2466)
atggaggaggaagcgactccaagaccccaatcgagtatcgtgcagatgcagaggcacatgctcaactcgcgctggcatgccaggcgtttggccaacaaaccccacggcgtcttcccaagcttggatggacatctaaggacctacaccaaggatatccgaccagccccgacctggcgggtcggacaatggctcgtggccgagggcgtacaagtccaatacgccgaggaagtataccgaatcactcccacggcctcgggcaagggaatcagcctcttgtgcccgacgcgcaagatcttgaaccgtgggaacactctgaacctggcaacgctcagcatcgacatcgagccggcttttgatggcgtcctctctgtcgagaccacccactggcaaggcgccgtccgtcgcggacccgacttcgacctcttccccgccggccggcccgaggtggacgccaaggtgaccaagacggagagcggcaccaccctgtcgtccgggacgctctcggcgacagtcagcggcaagccgcacgagttcgagatcgccttccatccgaccgggggcaagaagcccctgaccaccctgctcaaccggtcagtcggcctggcctacacgcccgccccgagcacgcccatgcagctggccgacatgcgcaacttccgccactacatcttcacccagaccaccctcgccgtcggcgagtccatccacgggctcggcgagcgcttcgggcccttcaacaaggtcggccagagggtcgagctgtggaacgcggacgggggcacctcgtccgaccaggcgtacaagaacgtgggcttctggatgagctcgcgcggctacggtgtcttcgtcgacactcccgggcgcgtcgagctcgagatcgggagcgagcggtgctgccggctccagacgagcgtcgaggggcagcggctccgctggttcatcatctacgggccctccccgcgcgacatcctgcgccggtactcggtcctcaccggagcccccggcagcgtgcccagctggtccttcggcctgtggctcagcacgtccttcaccacctcgtacgacgaggagacggtcaacagcttcctggccggcatgagggcgcgcgacatacccgtcgaggtcttccacttcgactgcttctggctcaaggcgttccagtggtgcgacttcgagttcgaccgcgacatgttcccggacccgaggggccagatcgggcgcctcaaggccggcggcctcgtcaagaaggtctgcgtctggacgaacccgtacctgggccaggcgtcccccgtcttcgccgaggccgcggccaggggctacctgctccggcgcaggaacggcgacgtcttccagtgggacctgtggcagacgggcatgggcatcgtcgacttcaccaacccggacgcccgcgcctggttcgccgcctgtctcgaccgcctcttcgacacgggcgtcgactgcatcaagaccgactttggcgagcgcatcccctccgaggatgtgcagtggttcgacccttcggtcgacccggagcggatgcacaactactacgccttcatctacaacaagctcgtctacgaggccctgcagaggcgttacggcgccaacgaggccgtcctgttcgcccgcgccgccaccgccggctgccagcggttccccctcacctggggcggcgactgcgagtcgacccccgaggccatggccgagtcgctacgcggtggtttgtccctcggcctgtccgggttcgccttctggagcgtcgacattggcggcttcgaggggtcgccgcctccctggatctacaagcgctgggtcgccttcggcctcctctgctcccactcgcgcctgcacggctccaactcgtaccgggtcccctggacggtcgacggcgacgaccagtccgaggagggatgctccgccacgctgcgcaagtggacccatctcaaggctcgcctgatgccctacctcttctcccaggcgcaggagagcgtccggggcgggctcccgctcagcctgagggccatgtgcatcgagttccccgacgacccgaccgcctggaccctcgatcgccagttcatgctcggcgacggcctcctcgtcgcccccgtcttcgaggaggacggcaccgtcgagttctacctgcccaggggcaagtggaccaacttcttcaccggcgaggtcaaggagggccccggctggttcgccgagacccacgggttcggcaccctgccgctctacgtccggcccaacacgctcctggttctgggcaaggaaggagagacgaggaccgtgtacgactacacgagcgacgtcgaggtgagggcgtattttgccagtgacagcgccagcgccgtgctggtcgacgccgagggcaagactgtaggtaccctgcgtgtcaaggacggggagattatcggaaaggaactgctatctggcaactcggtcatcaatgtcgtgagctcctga

SEQ ID NO: 416 - protein, 821 aa, Myceliophthora thermophilia
MEEEATPRPQSSIVQMQRHMLNSRWHARRLANKPHGVFPSLDGHLRTYTKDIRPAPTWRVGQWLVAEGVQVQYAEEVYRITPTASGKGISLLCPTRKILNRGNTLNLATLSIDIEPAFDGVLSVETTHWQGAVRRGPDFDLFPAGRPEVDAKVTKTESGTTLSSGTLSATVSGKPHEFEIAFHPTGGKKPLTTLLNRSVGLAYTPAPSTPMQLADMRNFRHYIFTQTTLAVGESIHGLGERFGPFNKVGQRVELWNADGGTSSDQAYKNVGFWMSSRGYGVFVDTPGRVELEIGSERCCRLQTSVEGQRLRWFIIYGPSPRDILRRYSVLTGAPGSVPSWSFGLWLSTSFTTSYDEETVNSFLAGMRARDIPVEVFHFDCFWLKAFQWCDFEFDRDMFPDPRGQIGRLKAGGLVKKVCVWTNPYLGQASPVFAEAAARGYLLRRRNGDVFQWDLWQTGMGIVDFTNPDARAWFAACLDRLFDTGVDCIKTDFGERIPSEDVQWFDPSVDPERMHNYYAFIYNKLVYEALQRRYGANEAVLFARAATAGCQRFPLTWGGDCESTPEAMAESLRGGLSLGLSGFAFWSVDIGGFEGSPPPWIYKRWVAFGLLCSHSRLHGSNSYRVPWTVDGDDQSEEGCSATLRKWTHLKARLMPYLFSQAQESVRGGLPLSLRAMCIEFPDDPTAWTLDRQFMLGDGLLVAPVFEEDGTVEFYLPRGKWTNFFTGEVKEGPGWFAETHGFGTLPLYVRPNTLLVLGKEGETRTVYDYTSDVEVRAYFASDSASAVLVDAEGKTVGTLRVKDGEIIGKELLSGNSVINVVSS

SEQ ID NO: 417 - DNA, 2160 bp, Myceliophthora thermophilia
  CDS (1)...(2160)
atgaaacccatcttgatcgcggccctttttggcacagccctgtcgtcgccggtgatcgcagccgacgaccccatctcgacgccgacgccgacagagctccaaccgggggcgtactggatccgcgcggtggccgcgcccaacttccacaagtacttccagacgataccggccaatgtgccgggggtggcgatcctcgagtcgcacacgacggccgggcagttcaacatcgaggacggccagctcgtcaacaaggtctcgaacccgccgctgtacatgtgggtggaggagccggccgacaaggcggacccgccgcgcacgctggcgacgggcttcaatacgaccaagaacacgttcggcacgttcgcgtggcagggcgacgccctgacctggtcggatccgagcatcaaccggcagaacctggcggcgtggctggtgtgtgcgaaacaggagctgttcatcaacacgggtgcctacggttggcagacgcccgagggttgcgctgatcagacgcgtcaccaaactgccggtaactggagagccctcatcgaccgttctatcgtgagcgtccgattccgttcgatcgcgccctccagatcgtggttgtcatcaactgaaacccatggccacctgccctttgcccagaccacctcctcccagcgaacgactcagggggttttccatggggtcatcttcccgcttgatgtcgccaagacgagcgcccagaacgactgccggccagtcgcattgtcgcagtggatcgcccagccgctgccgagtcgggcaccgccctgcgatgcccagaaagccaagcgtctaccgagaggccaggggtacaaggttggcacaccagacgaaattcgggaatctgcacgaaccctcgcctacgacctgatgctgttctacaagggcaatcagtccggtgaaattccaggcatcttgccaggtccgccaacagagcacaagggcgactactactggtgggaaggaggggccatgatgggcacatacgtcgattactggttcctgaccggcgacccgagttacaaccacgtcgtcacagagggcatgctgcatcaggtcgggcccaacgccgactacatgccccctaaccacacggcttccctgggcaacgacgaccagggattctggggcatgtcggccatgctcgccgccgagaataagttccccaacccgcccgaggacaagccgcagtggctcgcgctcgcccaggccgtctttcacactcaagcagcgcccgaccgccacgacggaacgtgcaacggcggccttcgctggcaggtgcctccgaccaacgcgggatacaactataagaacaccatcgccaacgcctgcttcttcaacctgggcgcccgcctggcccgctacaccgagaaccagacgtacgccgactgggccagcaagacgttccagtggctctgggacgtaggctacatcgaccacgagagctggaaggtctacgacggcggtcatgtcgagcacaactgcaccgacatcaacaaggcccagttcagctacaacgccgccctgctccttcacgggtccgccttcatgtacaactacaccaacggcagcgagatctggagggagcgcgtcgacaagctgctcgagggcatcctccgcgacttcttccccgacggcgtcgccttcgagctgccctgcgagggccgcaagggcgcctgcaccgccgacatgctgtccttcaagggctacgtccaccgctggatggcggtggtgaccaagctggtgcccgacacggccgggaccatcctgcccgtgctgcggacctcggccgaggcggccgcgaggcagtgcacgggcggcgacacgggccgccgctgcggcttctactggtccgagggcgtcttcgtcgacccggccgtcgacaagaccagcggcgccggcgaggccatgagcgtgctcgccgccgtgtccagcttgctcatcgacgaggcgcccccgccggccaccaacgccaccggcatcagcaggggcgatcccaacgccggcagccgcagccgcggcccttcggagccgctcgcgcccatcaccactgccgatcgggccggcgcgggcatcctgaccatgttgatccttggcggtttcattggtacctggagctggatgagcatcggtgattaa

SEQ ID NO: 418 - protein, 719 aa, Myceliophthora thermophilia
MKPILIAALFGTALSSPVIAADDPISTPTPTELQPGAYWIRAVAAPNFHKYFQTIPANVPGVAILESHTTAGQFNIEDGQLVNKVSNPPLYMWVEEPADKADPPRTLATGFNTTKNTFGTFAWQGDALTWSDPSINRQNLAAWLVCAKQELFINTGAYGWQTPEGCADQTRHQTAGNWRALIDRSIVSVRFRSIAPSRSWLSSTETHGHLPFAQTTSSQRTTQGVFHGVIFPLDVAKTSAQNDCRPVALSQWIAQPLPSRAPPCDAQKAKRLPRGQGYKVGTPDEIRESARTLAYDLMLFYKGNQSGEIPGILPGPPTEHKGDYYWWEGGAMMGTYVDYWFLTGDPSYNHVVTEGMLHQVGPNADYMPPNHTASLGNDDQGFWGMSAMLAAENKFPNPPEDKPQWLALAQAVFHTQAAPDRHDGTCNGGLRWQVPPTNAGYNYKNTIANACFFNLGARLARYTENQTYADWASKTFQWLWDVGYIDHESWKVYDGGHVEHNCTDINKAQFSYNAALLLHGSAFMYNYTNGSEIWRERVDKLLEGILRDFFPDGVAFELPCEGRKGACTADMLSFKGYVHRWMAVVTKLVPDTAGTILPVLRTSAEAAARQCTGGDTGRRCGFYWSEGVFVDPAVDKTSGAGEAMSVLAAVSSLLIDEAPPPATNATGISRGDPNAGSRSRGPSEPLAPITTADRAGAGILTMLILGGFIGTWSWMSIGD

SEQ ID NO: 419 - DNA, 861 bp, Myceliophthora thermophilia
  CDS (1)...(861)
atgcgagccagtgtctgcctagcggtaatgtccgctgtcctctgcccggcacgagcagcataccagggcttcaattacggcgccttcttcaccgacaacacgcccaagatgcagttggatttccaagccgagttcaagacggcccaaaacctggtgggcgcgcccgcgggcggcttccacagcgcccgcccctacaccatgatccaatggggcacggcaaccgacgtgatcagcgccgttcccgcggccatcgcaaccaacaccaacctcctcctgggcatccggtgctcggcaggcgacgcggtcgtcagcaacgagctcgcggcgcttcagaccgccatcccgacccacggcacccgcttcaccgacctcgtcgtcggcatctcggtcggtagcgaggacctgtaccgcagctcggcggccaccatcgcgtcctacgtcgcccgcgtgcgcgctgccgtccgcggcacgcccctggagggcacgccctgggccgacccggcgaaccgcgccgtgctcgagcccgtcgactttgtcggcatggacgcgtacagctactgggagagcacggtgcccaacgaggtcggcggcagccgagccaaggcgctgttcgacgccgcgatggaccataccgtcgccgccaccgcggccgtcgacgtgcgcaagatggtctggatcaccgagacggggttccccgtcagagggcacacgtccaacgaggcggtgccgtcgccggagaacgccaaggccttctgggacgcggtcgggtgcccgctctttgacatatcgtgtgcggagattgcgggtgagcggggagatgacggcgtcaacagcgatgacgacgcgtgcgatgcagagtga

SEQ ID NO: 420 - protein, 286 aa, Myceliophthora thermophilia
MRASVCLAVMSAVLCPARAAYQGFNYGAFFTDNTPKMQLDFQAEFKTAQNLVGAPAGGFHSARPYTMIQWGTATDVISAVPAAIATNTNLLLGIRCSAGDAVVSNELAALQTAIPTHGTRFTDLVVGISVGSEDLYRSSAATIASYVARVRAAVRGTPLEGTPWADPANRAVLEPVDFVGMDAYSYWESTVPNEVGGSRAKALFDAAMDHTVAATAAVDVRKMVWITETGFPVRGHTSNEAVPSPENAKAFWDAVGCPLFDISCAEIAGERGDDGVNSDDDACDAE

SEQ ID NO: 421 - DNA, 2088 bp, Myceliophthora thermophilia
  CDS (1)...(2088)
atggcggcacctgcgcccgacctggaacgggaaatgcccgcaaagcggaggagggtgcgcaaggggacgcggtcatgctgggagtgcaagcggcggaagatccgctgcatgttgccagcgcccggagatggcgcttgtatcggctgccaccatcgcggtgttgcttgcgtgccccaggatgtgcccgaggatccgtttccggtgaagaaggacaagcggcggctgggcgaacggcttgcgctgattgagcagactttgatgaaggacttccaagttcttgctggcaatgagactctatctacccttggtccatatctccccacgccgaacgcgcaagacataccaggggtcacacacgcggcgccggatgaagtcgaaacagagacggcccgccaccacttacttgcggcccttccggctcggaacgacctcgacatgctgctcagggaaagctgtagaccatcccgttacaccggtatctccaacactctaccgcacggcgccctgacgctcgagagactttccgcgtcgttttccactccgtccggagagagggctgtccaggttctctcggagccgccaggcgtgcttatgcgtcgcttggtggcagctgcgaggacgtgggtcacggccaacgaagacatgcacggaagcctcgactgtctgtccgccttatatcttccgatggataacaacaacgactccttcggccgcccggccaccaacaatatgccctcaatggcatccaccgccgctccgacccctcaacggcccgggacgcccaacgagtctgtcgggcgcaacccctttggcgacggtgtcgagtcgcaagcgtcgcaccggtctagcttcgactcgtcctcggcactgggccgcttcgaaggcggcggcgcgcgttacttccactcgcgccgcgtgcgcaagggcgagatcgagaagccatggaccaaacagtccgaccccaaggaaaaatgggttaccatcctgcctatcatcggcatcatcatcgggttgggtatctcgggcttcctggtgtgggacggcatccgcagcgtggtcaagcacaagtactgtcccgttctcatagaggattggtcccaaggcttcaacgagaaggtgtggatgaaggaggtgcaggtgaacgggttcggaaacggcgagtttgagcaaaccacggggggcgacgagaacgtgttcattgagaacggcaacctcatcatcagggcgacacctcgtgacgacgcgttgatgcaacagaactacaagatcgacctcctcaaggacggcacctgcacgtccaccaacccggccaattgcatcgccgccactaatatcacgaccggcaactcgtccatcgtgcctccagtcctctcgggccgcatcaacacgcggcgcggtgcctccatcaagtacggccgggtcgaggtgacggccaagctgcccgccggcgactggctctggccggccatctggatgatgccggtcgactccaagtacgggccgtggccggcgtcgggcgagatcgacatcatggagtcgcgcggcaacaactacacctacccgcagggtggcaacaacatcatgtcatcggcgctccactgggggccgaacccggccaacgacgcctggtggcgcaccaacgtcaagcggcaggcgctgcacacaacctactcggccgggttcaacacgttcggggtcgagtggtcgcaaaagtacctcttcacctacgtcaactcgcgcctgctgcaggtgctctacgtcaacttcgacgtgcccatgtggtcgcgcggcaacttccccgtccaggacagcaacgggacgcgcatcgacgacatctggggccacacgggccggccgcagacccccttcgaccagcccttctacctcatcctgaacctggccgtcggcggcaccaacggctggttcgaggacaacgtcaacggcaagccctggctcgaccgctcgcccaacgcccgcaaggacttctggcaggccaaggaccgctggctgcccacctggacgcagccgcggatggaggtgagcaaggtcgtaatgttgcagcagtgcgacggagatgaggatctctag

SEQ ID NO: 422 - protein, 695 aa, Myceliophthora thermophilia
MAAPAPDLEREMPAKRRRVRKGTRSCWECKRRKIRCMLPAPGDGACIGCHHRGVACVPQDVPEDPFPVKKDKRRLGERLALIEQTLMKDFQVLAGNETLSTLGPYLPTPNAQDIPGVTHAAPDEVETETARHHLLAALPARNDLDMLLRESCRPSRYTGISNTLPHGALTLERLSASFSTPSGERAVQVLSEPPGVLMRRLVAAARTWVTANEDMHGSLDCLSALYLPMDNNNDSFGRPATNNMPSMASTAAPTPQRPGTPNESVGRNPFGDGVESQASHRSSFDSSSALGRFEGGGARYFHSRRVRKGEIEKPWTKQSDPKEKWVTILPIIGIIIGLGISGFLVWDGIRSVVKHKYCPVLIEDWSQGFNEKVWMKEVQVNGFGNGEFEQTTGGDENVFIENGNLIIRATPRDDALMQQNYKIDLLKDGTCTSTNPANCIAATNITTGNSSIVPPVLSGRINTRRGASIKYGRVEVTAKLPAGDWLWPAIWMMPVDSKYGPWPASGEIDIMESRGNNYTYPQGGNNIMSSALHWGPNPANDAWWRTNVKRQALHTTYSAGFNTFGVEWSQKYLFTYVNSRLLQVLYVNFDVPMWSRGNFPVQDSNGTRIDDIWGHTGRPQTPFDQPFYLILNLAVGGTNGWFEDNVNGKPWLDRSPNARKDFWQAKDRWLPTWTQPRMEVSKVVMLQQCDGDEDL

SEQ ID NO: 423 - DNA, 1251 bp, Myceliophthora thermophilia
  CDS (1)...(1251)
atggttcgcggtctcctgccgctgggcgctgccctcctcggcgcaaccgccgtcctggccgatgggccgccgaagtgcactttggacaagaagtgcccgaaggaagctccatgctgctctcagtacggcgagtgcggtgtgggcgcctactgtctcggcggttgcgacccgcggatgtcctactcgctcgattcgtgcgtgcccgctcccgtgtgcaaggacaaggtttacaagatggacaatctcgatcgttacaaggacatcagcgatcggtcgggcaccgtcctttccacgactacgtatatgtggtacggcaaggtcaaggcacggctcaagacgtcccggggcgccggcgtggtgacggcgttcatcctgttcagcgatgtcaaggacgagatcgactacgaattcgtcggagtcgatctgcagactgcccagaccaactactacttccagggcattcccgactacaataactcgggcaacatcaccgtctccggcaacacgtacgacgagttccacgactacgagatccattggacacccgacgaaatcacgtggctcgtcgacggcaaggtcggccgcaccaagaagcggtccgagacctggaacgagacgctgaaccagtgggactacccgcagaccccgtcgcgcgtccagctttccatctggcccggcggcgccgagaccaatgccaagggcaccatcgactgggcgggcggcccgatcgactgggacagcgacgagatcaagaactttggctactactttgccaccttcagcgaggtctcggtcgagtgctacaagacggacaccccgcccggcaccagcaagggcaagtcgtactactacgacgacgtccgcggcaccaacgacacggtcgtcgacagcaacaagcgcaccaccctcaagagcctgctcggcacgggcaccgacatggacaagggcgacacaacctcctcgggcaagccctcctcgacctcctccgttaacgccatcccgggaggcggttccaccccgcccaaccaggtccccggcggtagcaacccgtcttccagcgacggctcgagctcgggctccggcagcagcggttcctcgacatgtagctccgagggcttccagcagcactgcggcgaagacggctccagcagcaccgacaacaagaacgacggcgcccgcggcgtcgaccggacgctgggcgccagcgccttcgctgtcattgttggcttcgccggcctgctgttgctctga

SEQ ID NO: 424 - protein, 416 aa, Myceliophthora thermophilia
MVRGLLPLGAALLGATAVLADGPPKCTLDKKCPKEAPCCSQYGECGVGAYCLGGCDPRMSYSLDSCVPAPVCKDKVYKMDNLDRYKDISDRSGTVLSTTTYMWYGKVKARLKTSRGAGVVTAFILFSDVKDEIDYEFVGVDLQTAQTNYYFQGIPDYNNSGNITVSGNTYDEFHDYEIHWTPDEITWLVDGKVGRTKKRSETWNETLNQWDYPQTPSRVQLSIWPGGAETNAKGTIDWAGGPIDWDSDEIKNFGYYFATFSEVSVECYKTDTPPGTSKGKSYYYDDVRGTNDTVVDSNKRTTLKSLLGTGTDMDKGDTTSSGKPSSTSSVNAIPGGGSTPPNQVPGGSNPSSSDGSSSGSGSSGSSTCSSEGFQQHCGEDGSSSTDNKNDGARGVDRTLGASAFAVIVGFAGLLLL

SEQ ID NO: 425 - DNA, 807 bp, Myceliophthora thermophilia
  CDS (1)...(807)
atgggctgcctgatcgaggccggcgtctacaatgaagatcaactcttctactcggagaacctgcgcaaagtcaacgagacgcaattcctggtgccatggatttatcgcaacgagttctccctgcatcccggcccgggcaggcacttcttcctgcagacacacggcatctcttcgcgagccgacatctttctgaacggcaaacgagtggccaattcttcggagcaggcgggttcgtacgttggccggatttacgacatcaccaaacaggttcacagagaaaatgcgctggcaattcaggtgtacccgaccaactactactacgacctggcgctcggatgggtggattggaacccatggccggccgacaacggcaccggcgtctggcgggacgtcgagatcaagcagaccggggcggtcatgctggagccgttgcgggttgtgacgcacttggggccgacgctcggagatgagccagcaaacgtgaccctcaaggcccaagcacataaccttgaaaactacaccgtcaccatcacggccaccggccacatcgccctggacccccactctgataaccaacaacaccatcaccaccaccaccctattacctggcaccgaacgtacacgctcccacccctttccaccaccgagctcgccctctccgcgaccattgccgacccccagatctggtggccccgccaatggggtggtcaaccgctctacaccgccgccttgaccgtcaccacgcgcggcacaccacgcccgtcgacggtccacggcaccttcggctgcgcacgtcgagcgagctga

SEQ ID NO: 426 - protein, 268 aa, Myceliophthora thermophilia
MGCLIEAGVYNEDQLFYSENLRKVNETQFLVPWIYRNEFSLHPGPGRHFFLQTHGISSRADIFLNGKRVANSSEQAGSYVGRIYDITKQVHRENALAIQVYPTNYYYDLALGWVDWNPWPADNGTGVWRDVEIKQTGAVMLEPLRVVTHLGPTLGDEPANVTLKAQAHNLENYTVTITATGHIALDPHSDNQQHHHHHHPITWHRTYTLPPLSTTELALSATIADPQIWWPRQWGGQPLYTAALTVTTRGTPRPSTVHGTFGCARRAS

SEQ ID NO: 427 - DNA, 1890 bp, Myceliophthora thermophilia
  CDS (1)...(1890)
atgctgttctcgtcggtcctactcagctttgtgtccacggtagggctagccgccgtggtcactccccggggcccagcaccctcctcgttggaagcacgggctgccgcgggggaccggcttgtgttctgccacttcatgatcggcatagtcggcgaccgcaccagcgcggccgactacgacgatgatatgcgccgggccaaggaggcagggatcgacgcctttgccctcaacatcggcgtagatgggtataccgaccagcagctcaactacgcgtacgagtcggccgccagaaacgacatgaaagtcttcatctcgtttgacttcaactggtatagcccgggaaatgcggcggctgtgggcagcaagattgcccagtacgccagcaagcccgcacagctcctcgtcaacgaccgcgtcttcgcctcgtcctttgccggagacggcctggacgtcgatgccgtgagggccgccgccgggaccgacgtcttctttgttcccaacttccatcccggccaaggttcgctggctgccgtcgatggagccttcaattggatggcatggccgaacgacggaaacaacaaggcgcccaagcccggaaagtcgctgagcgtggccgacggagacaacgcctacctcgactggctaggcgacaaaacatacatggctcctatctctccctggttctttacccactttggaccggaggtttcgttcagcaagaactgggtgtttcctggcggctcgctcattttcgaccgctggaacgaagtgctccagaaagggttcccaatggttgagctcatcacctggaacgattatggcgagtctcactatatcggtccattgagctctcctcactacgacgacggcaattccaagtggacaaatgacatgccgcacaatgggtggctcgacctctccaagccgtttatcgccgcctacaagaacaaggacacgtcggtggacaagtacattaccgacgaccagatcatctactggtaccgacggacgctggggtcgctcgactgcgacgccaccgacactacggcggggcggcccgccaacaacgacagcggcaactacttccagggccgcccggatggatggcagacgctggaggatgccgtctacgtggtcacgctgctcacggagcccggcacgctcacgattgcttcgggcgaccaggtggtcgagcaggaggtgcccgccggcgcgaacctcgtgaaggtccccgccgccgtcggaaagcagcgcttcagtctctcgcgtggcggcacggtcgtgctccaggacacgtcgctcatggacatctccaacgtctgcccgtgcggactgtacaacttcaacgcgtacgtgggcaccgtccccgccggcttcaacgacccgctcggggagcacggcctggcgtctctgactatcggccttcatgtcaccacctgctctgccaccccttcgctcggcacgaaccctcccaccaccgccaccaccaccgccaccgcctccacgacgacggccggtcctatcaccaccagcaccaccagcaccaccagcaccagcagcggcacgacaagcgccccttctccgagcaagacgacctcggagcccactcagccgaccagcacatccgagcccgacctgccctgcaacggcggcaccaacgcggacggcgagacgggcaactacgcgggcctgtgcagcttcgcatgcagctacggctactgcccgccgggcccctgcaagtgcacctcgcgggggacccccggcacgccgccgccgcccagcggccgcgacgggtgcccgctgccgggcgagggcgacggctacaagggcctgtgcagcttcgcatgcagccacgggtactgtcccgagaccgcgtgccagtattgctag

SEQ ID NO: 428 - protein, 629 aa, Myceliophthora thermophilia
MLFSSVLLSFVSTVGLAAVVTPRGPAPSSLEARAAAGDRLVFCHFMIGIVGDRTSAADYDDDMRRAKEAGIDAFALNIGVDGYTDQQLNYAYESAARNDMKVFISFDFNWYSPGNAAAVGSKIAQYASKPAQLLVNDRVFASSFAGDGLDVDAVRAAAGTDVFFVPNFHPGQGSLAAVDGAFNWMAWPNDGNNKAPKPGKSLSVADGDNAYLDWLGDKTYMAPISPWFFTHFGPEVSFSKNWVFPGGSLIFDRWNEVLQKGFPMVELITWNDYGESHYIGPLSSPHYDDGNSKWTNDMPHNGWLDLSKPFIAAYKNKDTSVDKYITDDQIIYWYRRTLGSLDCDATDTTAGRPANNDSGNYFQGRPDGWQTLEDAVYVVTLLTEPGTLTIASGDQVVEQEVPAGANLVKVPAAVGKQRFSLSRGGTVVLQDTSLMDISNVCPCGLYNFNAYVGTVPAGFNDPLGEHGLASLTIGLHVTTCSATPSLGTNPPTTATTTATASTTTAGPITTSTTSTTSTSSGTTSAPSPSKTTSEPTQPTSTSEPDLPCNGGTNADGETGNYAGLCSFACSYGYCPPGPCKCTSRGTPGTPPPPSGRDGCPLPGEGDGYKGLCSFACSHGYCPETACQYC

SEQ ID NO: 429 - DNA, 2553 bp, Myceliophthora thermophilia
  CDS (1)...(2553)
atggccagcagccggtaccggtacacgttcccgaggaatccgaaggccaatccgaaggccgtcgtgacaggcggcaagggatcctcttactatcgcttcaccctcctcaccgaacggttgatccgttacgagtggtccgaggacggaggcttcgaggatcgcgcgtccacgttcgcggtattcagatactttgatgccccgcagtaccgcgttgtcgagacaaacgacagtctcgagatcatcacggactactttcacctcacctatgacaagaagaagttctcatcggaaggactttccgtcagagtcggctccgacctctggaattacgacggcaagagttatggagacctgggcggcaccgcccggaccctagacggcgcctatggccgcgtggacctggaaccgggtgtgctctcgcgcaaagcttatgcggttctcgacgacagcaagtctatgctctttgacgacgacgggtggattgccattcgcgagccgggccgcattgacggttacgtgtttgcctacagcggcgagcacaaggccgccatcagggacttctaccgcctctccgggcgtcagccggtgctcccccgctgggtgctggggaactggtggtccaggtaccacgcatactcggccgacgaatacatcgagcttatggaccacttcaaacgcgaaggaatcccgctcacgacgagcatcgtggatatggactggcaccgggttgacgacgtcccgcccaagtacggctcaggatggacgggctacagctggaaccgcaagctgttcccggaccccgaggggttcctgcaggagctgcgtaatcggaacctgaaagtggccctcaacgaccacccggcggacggcatccgggcgtatgaggatctgtacccggcggtggccaaggccctgaatcacgacacgtcgcgagaggaaccgatcaagtttgactgcaccgatcgcaagttcatggacgcctacttcgacgttctgaagctcagccttgagaagcagggcgtcatgttctggtggatcgactggcagcaaggcaccggcagcaagctccccagcgtagacccgctgtgggtgctcaatcactaccactacctcaccagtaagcgcaacgcgaaagacatccaacgtcccatcacattctcccgctacgccggcgccggtgcccatcggtacccgatcggcttctcgggcgacacgcagacgacttgggaaggtctcgagttccagcccgagtttaccgcaacggcatccaacatcggctatggctggtggagccacgacatcggcgggcattggggcggcgtccgctccaaccagctgacggtccgctgggtccagctgggctgcttctccccgatcctgcggctgcactcgaacaagagcccgtggaactcgagagagccgtggaactacgaggacgaggcgcacaggatcatgaaggacttcctcatcctgcgccaccgcctcatccccttcctctacaccatgaacatccgggccagctacgagagcgagccgctcatccagcccatgtactggaatcacccgaaggacgaagaggcctacacggtgccgacgcagtactacttcgggccggacctcctcgtggcccccatcacgtctcccaacagcaccgtcaccctgatgggccgcgtgcgcgcctggctgccgccgggccggtacgtcgacctgttctacccgcacctggtctacgacggcggccggtacatgcacctgcaccgcgacctgtcgcagatccccgtgctcgcgcgggagggcaccatcgtgccgctggacacgacgcccaggacgggccacggcgccgcgcggccgaccgagatcaccctcctcctcgtcgtcggccgggacgcgcactttgagctggtcgaggagccggagcagcaggaccaccatcgccacggcggcggcgacgacggcgatgaccaacccccgctcagcgcgttcgcccggacccccatctcgtggtcgcaggcggacggcgtgctcaccatcgggccggagtggaacggcgccggggcccgccgctggcggcagtggaacgtcaagctggtcgggcacaccaacacggacgtgcaggcgcaggtgcccgggttccgggtcacgcgcgacgtcgagggcgggtgcacgacggtggcgctcggcaacgtgcaccggtggcagcagccgcaccagcgggacggcggcgggttcgagatctcgctggggcgcgacctgcagctggacgtggtggacgtgcgcgcgcgcgccttcgaggtcctgcaccgggccgagatggggtacgaggccaaggaccccgtctgggacgtcttcacgtccggcgacgcggtgcagacgcgggtgcagcggctggcggcgctcgacgtcgacgccgcgctcaagaacgccctcatggaggtctgggcggccgacgggcgggccgagggcagcgcggcgggctacgagacctgggtggacgtgaaggcgtgcgcgggagacgcggtcgaggaggcgctcaaggagtacgttatcgtgtga

SEQ ID NO: 430 - protein, 850 aa, Myceliophthora thermophilia
MASSRYRYTFPRNPKANPKAVVTGGKGSSYYRFTLLTERLIRYEWSEDGGFEDRASTFAVFRYFDAPQYRVVETNDSLEIITDYFHLTYDKKKFSSEGLSVRVGSDLWNYDGKSYGDLGGTARTLDGAYGRVDLEPGVLSRKAYAVLDDSKSMLFDDDGWIAIREPGRIDGYVFAYSGEHKAAIRDFYRLSGRQPVLPRWVLGNWWSRYHAYSADEYIELMDHFKREGIPLTTSIVDMDWHRVDDVPPKYGSGWTGYSWNRKLFPDPEGFLQELRNRNLKVALNDHPADGIRAYEDLYPAVAKALNHDTSREEPIKFDCTDRKFMDAYFDVLKLSLEKQGVMFWWIDWQQGTGSKLPSVDPLWVLNHYHYLTSKRNAKDIQRPITFSRYAGAGAHRYPIGFSGDTQTTWEGLEFQPEFTATASNIGYGWWSHDIGGHWGGVRSNQLTVRWVQLGCFSPILRLHSNKSPWNSREPWNYEDEAHRIMKDFLILRHRLIPFLYTMNIRASYESEPLIQPMYWNHPKDEEAYTVPTQYYFGPDLLVAPITSPNSTVTLMGRVRAWLPPGRYVDLFYPHLVYDGGRYMHLHRDLSQIPVLAREGTIVPLDTTPRTGHGAARPTEITLLLVVGRDAHFELVEEPEQQDHHRHGGGDDGDDQPPLSAFARTPISWSQADGVLTIGPEWNGAGARRWRQWNVKLVGHTNTDVQAQVPGFRVTRDVEGGCTTVALGNVHRWQQPHQRDGGGFEISLGRDLQLDVVDVRARAFEVLHRAEMGYEAKDPVWDVFTSGDAVQTRVQRLAALDVDAALKNALMEVWAADGRAEGSAAGYETWVDVKACAGDAVEEALKEYVIV

SEQ ID NO: 431 - DNA, 1395 bp, Myceliophthora thermophilia
  CDS (1)...(1395)
atgaggatatctgggatcttggcctcgctctgtgtgctggcccggtgcgggacggcaatcgacttggtacttggggatgaggactcggttaaatccgcagccagcacaatagcctttgggctggtcaagtattacacgggcaataacacgggcgacactccgggaaacctgccggacccatacttctggtgggaagcgggcgccatgttcgggactctggtcgactactgggcgctcaccggagacgactcgtacaacgccatcaccacccaggcgatcctgcaccaagcgaccgagaagggcgacttcatgccgcccaaccagacgcgcacgctcggcaacgacgaccaggggttctggggcatggcagccatgtcagcggccgagaacaacttccccaacccgcccgaggaccagccgcagtggctggccctggcccagtccctcttcaaccagtacgcctcccgctgggaggaggccacgtgcggcggcgggctccgctggcagatcttcacctttaacaacggcttcaactacaagaactccatctccaacgggtgcttcttcaacatcgccgcccgcctggcccgctacacgggcaacgagacctacgccgagtgggccgaaaagatctttgcctgggaggagtcggtgggactcatcgacgccaacctgacggtgcgggacggcgtgcacgtcagcctcgaggacggcagctgcaacagcagggacgagaaccagtggacctacaacgcgggcatcttcctgcacggcgcggccgtcatgtacaaccacaccaacgcctcggccatctggcgggagcgcgtcgacggcctgctggcctccaccacggccaccttcgtcgacccggccacgggcgtgctggtcgagcagctgtgcgagcccagcggcttctgcaacacggaccagcgctccttcaagggctacatgacccgctggctggccgggaccgcgcagatggcgccgcacaccctcgacgccgtccgcccgctgctcgaggccgacgccgccgccgccgcccgtgcctgcaccggcgaccccgcgcctcccgtgttccgcggccacccgggcaccgcgtgcgggttccgctggaccaccggcgccttcgacggctccgccggcgtcggcgagcagatgaacgccctctcggccgtcatgtaccccctcgtcgtccggggagccgccgccccgcccctgaccgccgacacgggcggtacctcgaagggcaaccccggcggcggcgccgcgcccgcgcacgaggaggtcggcatcgggtgcgcggagatcacgctccaggaccgggtcgccgccgggttcgtcacatcggccctcgcgctcggcgtcgtcgccgggtccgcgtttgtcatcctctaa

SEQ ID NO: 432 - protein, 464 aa, Myceliophthora thermophilia
MRISGILASLCVLARCGTAIDLVLGDEDSVKSAASTIAFGLVKYYTGNNTGDTPGNLPDPYFWWEAGAMFGTLVDYWALTGDDSYNAITTQAILHQATEKGDFMPPNQTRTLGNDDQGFWGMAAMSAAENNFPNPPEDQPQWLALAQSLFNQYASRWEEATCGGGLRWQIFTFNNGFNYKNSISNGCFFNIAARLARYTGNETYAEWAEKIFAWEESVGLIDANLTVRDGVHVSLEDGSCNSRDENQWTYNAGIFLHGAAVMYNHTNASAIWRERVDGLLASTTATFVDPATGVLVEQLCEPSGFCNTDQRSFKGYMTRWLAGTAQMAPHTLDAVRPLLEADAAAAARACTGDPAPPVFRGHPGTACGFRWTTGAFDGSAGVGEQMNALSAVMYPLVVRGAAAPPLTADTGGTSKGNPGGGAAPAHEEVGIGCAEITLQDRVAAGFVTSALALGVVAGSAFVIL

SEQ ID NO: 433 - DNA, 2517 bp, Myceliophthora thermophilia
  CDS (1)...(2517)
atggcgtcgggacgccaattgagctttctgctcaccctcggctggctcagtgccctcttgaccgcccttggcttcgcaactgcagtatcagcgaacgcggctaccgatgacgaaccgatcctgcaccgcgagattgggcgccagaataatcagagtttactatggggcccctatcgccccaacctctacttcggggtgcgccccaggatccctcagagcttgatgacgggcttgatgtggggcaaagtcgagacatacactgacttccagcacacggtacggtacacctgcgaacagaatgagggcatgaaggggtatggatgggaggagtacgacccccggcggggcggtatccagaccatccacgacatccagaacggcctcgacctcaccacctcgttcgtcaaggtacccggcggcacgcacgggggcaattgggcggcacgcatcaagggagtgctcaacggtgatgcgcccaaggaccagaagactatcgtggccttctacgtcacccaggaaggggccgactcggagctgcaggcgcttcccggcgaggatgagtttggatatgagggggacgtcaccctgaaggggcactcggagtcgcttggtaactacaagcttgtcgtcacgagaggccaaggggtccagcccaagagcgaccatgacatctcgcgaatccgcggtcccggccagaccgtcgtccagtccttgacctaccccgaggagcacatatggcaggcgaagccgatcctattcagacagctcaaggagggcgtcgactggttggtcgagaacaaatacgacgtccaggaccccccgccgccatggcaagtgtacttgctcaccaaccgacccggcgccggaaacgtgcatatcgtgcagaaggtctttgaaggcgactttgagttcgatgtgctcttctctagcgagtcggcaggcaaagagctgacgagcgccgatctgtcgagggagatcaaggagacgaccgagtccttcgccgagcgcttctcgagcgtgttcgccccgaaggctcccttcagtgctgacaggttcaaagagtttggccggagcatgttctccaacctgatcggcggcatcggctacttctacggacatgccgtcgtggaccggtcgtacgcgcccgagtacgatgaggagaacgagggtttctgggaggagactgccgaagcgcgggcccgcaaccagcaggcattggaggggccgtacgagctgttcacgagcatcccatcccggccgttcttcccgaggggcttcctgtgggatgaggggtttcacctccttcccatcgccgactgggacatgaacctcactctcgagattgtcaagagctggttcaacctgatggacgaggacggctggatcggccgcgagcagatcctcggcgccgaagcacgcagcaaagtcccccccgagttccagacacaatatccccactacgccaacccgccgaccctctttttcatcatcgacgcgtttgtggaaaggctcgccggggcggcaaatggcagtctaggagactcgggcaaagaacgactcgcgcaacagcacgacgagtccctccccgccaccgcctccctcgataacccggaagtcggcctcgaacacctccggcgcctgtaccccctcctgcagcgccagttcaactggttccgcaggacccaggccggcgacatcaagtcctacgagcgggaggcctactcctcccaggaaggctaccgctggcgcggccgcacgcccacgcactgcctgacgagcgggctggacgactacccgcgcccgcagccgccgcaccccggcgagctgcacgtcgacctgctgtcgtgggtgggcgtcatggcgcggtcgctggccaacgttgccgacgcgctcggcctctccgcagacgcggagcagtacaagaaggtcctgaccgccatcgagcgcaacctggacgacctccactggtccgaaaaggacggctgctactgcgacgcgaccgtggacgactttgaggagcacacgctcgtctgccacaagggctacatctcgctcttcccgttcctgacgggcctgctcaagcccgacagccccaggttggggaggctgctcaagctgataggcgacgaggaggagctctggagtccgcacggcctgcgcagcctgagcaaacaggacgagttctacggcacggctgaaaactactggcgcagtccggtgtggatcaacatcaattacttggcgattgtccagctttacaacgtggccacacaggaaggtccccatagggagacggcgcgagacctgtactcgcgcctgcgcaagaacattgtcgacacggtctaccagagctgggaggagacgggcttcgcgtgggagcagtacaaccccgagacgggtaagggccagcgcacgcagcacttcactggctggaccagtctggtggtgaagatcatggccatggaggacttgccagcggccgaggcggcagcggggcatgtgagggacgagctgtag

SEQ ID NO: 434 - protein, 838 aa, Myceliophthora thermophilia
MASGRQLSFLLTLGWLSALLTALGFATAVSANAATDDEPILHREIGRQNNQSLLWGPYRPNLYFGVRPRIPQSLMTGLMWGKVETYTDFQHTVRYTCEQNEGMKGYGWEEYDPRRGGIQTIHDIQNGLDLTTSFVKVPGGTHGGNWAARIKGVLNGDAPKDQKTIVAFYVTQEGADSELQALPGEDEFGYEGDVTLKGHSESLGNYKLVVTRGQGVQPKSDHDISRIRGPGQTVVQSLTYPEEHIWQAKPILFRQLKEGVDWLVENKYDVQDPPPPWQVYLLTNRPGAGNVHIVQKVFEGDFEFDVLFSSESAGKELTSADLSREIKETTESFAERFSSVFAPKAPFSADRFKEFGRSMFSNLIGGIGYFYGHAVVDRSYAPEYDEENEGFWEETAEARARNQQALEGPYELFTSIPSRPFFPRGFLWDEGFHLLPIADWDMNLTLEIVKSWFNLMDEDGWIGREQILGAEARSKVPPEFQTQYPHYANPPTLFFIIDAFVERLAGAANGSLGDSGKERLAQQHDESLPATASLDNPEVGLEHLRRLYPLLQRQFNWFRRTQAGDIKSYEREAYSSQEGYRWRGRTPTHCLTSGLDDYPRPQPPHPGELHVDLLSWVGVMARSLANVADALGLSADAEQYKKVLTAIERNLDDLHWSEKDGCYCDATVDDFEEHTLVCHKGYISLFPFLTGLLKPDSPRLGRLLKLIGDEEELWSPHGLRSLSKQDEFYGTAENYWRSPVWININYLAIVQLYNVATQEGPHRETARDLYSRLRKNIVDTVYQSWEETGFAWEQYNPETGKGQRTQHFTGWTSLVVKIMAMEDLPAAEAAAGHVRDEL

SEQ ID NO: 435 - DNA, 1272 bp, Myceliophthora thermophilia
  CDS (1)...(1272)
atgcggttctcgacactgttcccggtgctcagcaccgtcgtcctcccgtcctcggccgccctcgtcaaggaaggctcaaggtgcgtcgtgagccccatctcggccgccgtcgcctcctccgaggagggcggactggtcgcgcgccagtcccaggtggacgacacgccgcagatcctcgaggccttctcgcagtgcggccaggatggcaccatcatcctgcaggagggcacctatcacatccggcaggtcatggacacgaccaacctgcgcaacgtgtccatcgagatctacggcacgctggtctggagcgccgacaacctcgactactggcggcgggccagcttcgacgtcgtctacgccggccgccagaccgcctggcgcatcggcgggcgcgacatcaccatgcgcggcttcggcaaggccctcttcgacggcaacggccaggcctggatcgacctggccaacggcgcgtccaacctgaacgggaggcccatctcgctgaccgtctggtacggcaccaacgtgttgatcgacggcatcacctggcggatggcgcagttctggcacacttttgttgcccactcggagaacgtgaccatgaccaacttggacatgtacaccctctcttccaacggtaggagttcccagaacacggacgggacggatacctggaactccaagaatatcttcatcgcgaactggacggtgacctgtggtgatgactgcatcgctgtcaagggtaacagcaccaatgtccacgtcaagaacgtggcatgcaccgagtccggcgccaccgtcatcggcagcatcggctccaacgcgtggcagcccgactacgtcgagaacgtcgtgtttgagaacatcacggccaagcactcgagcaacgccgcctggatcaaaacgtaccctggaacgggatacgtccgcaacgtcaccttccgcaacatccacttcgaggacgtcaaccagcccatctacctatcctcgtgcatctactcgtacaccaactgcgactcgtcccgcctcaggatcacggacgtcacctggcagaacatcacgggcacgagccggtacaacgtggcggcggccatgcactgcagcgcggccgccccctgcgacggcttccgcttcgagaacatcgacatcaagcccaagaacggcggctccgccaaggtgctgtgctccaacatccagaaccaggccaccatgggcctcacctgtaccgggccctgtccgggctcccagccgcagcagctgtcggggaacgtgtga

SEQ ID NO: 436 - protein, 423 aa, Myceliophthora thermophilia
MRFSTLFPVLSTVVLPSSAALVKEGSRCVVSPISAAVASSEEGGLVARQSQVDDTPQILEAFSQCGQDGTIILQEGTYHIRQVMDTTNLRNVSIEIYGTLVWSADNLDYWRRASFDVVYAGRQTAWRIGGRDITMRGFGKALFDGNGQAWIDLANGASNLNGRPISLTVWYGTNVLIDGITWRMAQFWHTFVAHSENVTMTNLDMYTLSSNGRSSQNTDGTDTWNSKNIFIANWTVTCGDDCIAVKGNSTNVHVKNVACTESGATVIGSIGSNAWQPDYVENVVFENITAKHSSNAAWIKTYPGTGYVRNVTFRNIHFEDVNQPIYLSSCIYSYTNCDSSRLRITDVTWQNITGTSRYNVAAAMHCSAAAPCDGFRFENIDIKPKNGGSAKVLCSNIQNQATMGLTCTGPCPGSQPQQLSGNV

SEQ ID NO: 437 - DNA, 5265 bp, Myceliophthora thermophilia
  CDS (1)...(5265)
atgagacaacgcgcgtctctcgatattcttgccgatgatccgggcgcgccggccgtgctcgaccatgccgaacccaagattgctaccggccggcgaccaaagcgagactcgcgcacgagctcctcgagcagctcgcccgcccctcccgaccatgaagagtccgattttttcctcgctggaaacgactcccagtcgtctcttggggtgcccaactttcaggacatgcaggtcaccgacgacgagtgtcttccgcccgtccaccgattgccgaacgagatcctgatcgccatcttcgcgaagctcagcagctcatcagacctgttacatgtcatgctgacgtgcaagagatgggcccgcaatgcggttgatatcctctggcaccgcccttcgtgctcgacctgggagaagcatcagatcatttgccagacgttgagcctcgagaatccctacttctcctaccgcgacttcgtcaggcgtctaaacttggccgctcttgcagacaaggtcaacgatggcagtgtacagcctctagccgagtgtacccgggttgaacgtctcaccttgacgggttgcagcaacctgacggactcggggatcatcgccctcgtcaagaacaacaagcatctctactccctcgacgtttcattaagcgcgacaacaaacactggtggtcctgttttccgcgaccacatcacagaagcctcgatcgatgccatcaccgagaactgtccgcgtctgcaaggcctcaacatttctggctgccagagggtttccaatgagagcctggtccggcttgcccaacgctgcaagtacctcaagcggctcaagttgaatgattgcactcagctccaggatagcgcggtcctcgcgttcgccgagaactgccccaacatactcgagattgaccttcagcagtgccggttcatcggcaacgaaccgattaccgcgctcttcaccaagggccacgcgctgcgtgagctccgcctcgccaattgcgagctgatagacgactcggccttcctttcgcttccgtcgaacagaaagtatgagcatctccgcattctcgatctgagctccagcatggggattaccgaccgagccatcgagaagatcatcgaggtcgcaccacgacttcgaaaccttgtgctgcagaagtgccgcaacctgacggacgctgcggtatacgccatttcccgtctcgagaggaatctgcatttcctccacttgggtcactgtaaccagatcacggacgatggtgttaagcggctcgtttcgatgtgcaccaggatcagatacatcgatcttggttgttgcactaatcttaccgacgactcggtcaccaggcttgccaacctccccaagctgaagcggatcggccttgtcaagtgtgcgaatatcacagacgccagtgtcattgccctagcgaacgcgaaccggcggcctaggatgcgcagggatgcgcatgggaatctgataccgggagagtacagcagcagtcaaagctgcctggagagagttcacctgagttactgcaccaacctgacgcagacgagcatcatccgactcctgaactcttgccctcgcttgactcaccttagcttgaccggggtccaggcgttcctgagagaggacttggaacggtactcccgccctgcgccacctgaatttacggatcaccagcggtccgtcttttgtgtcttctcggggcaaggtgtcgtcggtctgcggaagcatttcaaccgattcatcgccgcggcagaggagtcgcggcgcgccaaccgggctgtgattcaagcagacgccccgatattccctcccgcacctcagggtgtgctcattgacgtttccgttccagttgatgacggagaccctgatggattggatgacgatgacgttcccgaagacgggtccgagatggttgtcgacacacagccattgctcggccatcacaacatcgggcatggtcaccaccccatggcggcgggggccatccccgtcgtccctcctccgataccaaccatggcgcaagcccttccactggggggttcgactgttccagctgccaacgttgaggagcaagcgacgacgtttccaacaccgggcgttcatccgccgcccgacaccactgctcctggatcctcttccccttccgggccgggggaggttggtggtgctgacgaggatgatgtggtccaggaggctgccaacgcggctggacaaggctcgacaacgattggcatggacgcacatggttccggggggtctatgcgcgtttctgtgatcgttccggttgatacttcgatccaacctgagccgaacgcgcaacccggccctggtcaggaggtccagggtgctgggggcttgtcggcctggatagcctcgtttaccctgctctcgctcctttcttcacggtttggatcctgcgcggtcgcatcctcgtccggctcgagtccaattctcgacaatgggctccagcacgagatccaatgggaccgtcacagcatcgtcatcgggggcgaccgcctgttcttgtttggaggagagatgcatcccttccgactgccggttcccgagctgtgggagggcattctgcagaagatcaaggccatgggactgagaatggtgtccatctacatacactggggcttccatgcgccggctccgggcaaggccgtgcgggagggcgagaacgtgctgctcgtggtacacgacgacacgggccacgaccagctgaacgcggcggtcaacccccgcagggcgctcaacgccacgctgctggggggtgccccggaccgggccgggctggaccgggtgcggacgcgctataacgagggcgggctggcggcggagcggctgggctggcacctgcgcgggttcgacgactcggcctgggagacggccgagggcccgtggttgggttcgagggccccggcgtgcgcttctaccgcgggtggttgccgctggacgtgccgcgggggatcgacctgtccctcgcgttccgctttaaagccggccgaggaggacgtcgagagggggacgctggagtacacggtgctcctcttcgtcaacggctggcagtacgggagcggcgacaatctgatcggcttggccgtctggtcgctgcaggaggagggagcgcgggttgatgtcgacgttgtggtcgggtatgtggcggactcgtcgctagacgtgaaattcgacggcagctatctgcggccgggatgggatccggatttctggaacaagatccttgaaacaaacagcaactgggtcgccgagatgcccgatccggatgagacaatgaagcatttcggcgccagaacttgcggcgccgatagcggcttagccaccggcaactcagacgaggtcacgagtcttccgacccagctgcgcgctctcaacggacactggaccctcggggccaagatgtgccaccgcatcggttgccgtgagaacacgggtctatactggtgcaatctccatggctcccatatccgggacatgtgctgccacggaagcgacggctgtctctattcgggcgaccccatgtccggcgtcgaagccttccctgacagcgaccgcgaggctgcacacacccgcatcttggcgggatatgatcactgctccgatcccgcaaatgtcgaccctttgatttaccgctttccggggaagctaggtacgatggccgagtctgccgtcagcaagcgccgcatcctcaccgagaggcgggtcgtgtttatctgctttctcgtcgcgctcggccagtttcagtacggctacgactcggccgccgtcgccggcttccagagcatgccgggctttctcgccgtctacggctacgccgacccggccaaccccatcggtttcaacatccacacagacgtccagcggctgatccagtcgctcatgaacgtcggcggcttcctcgccgccgtcgccatctacgcggcccacacccgggtctcgaggagggccgggctgtgggcgggctgcgctttcgcgttcgtgtccatctcgctgcagctggggctgcgcagcctggccggcctgtatgcggggcggctgctgctgggcgtgtccaacgggctgctggtgccctactgcgtcacgtacatggccgagtcggcgccgtcgctgctcaggggccccgtcgtgggtatgagcaccttccagacgtcgctcggcgccctgctcgggatcctcgtcgacaactactgccagccccacggcggcgccgtctcgtggatgatcccgctcgccgtcatgtacgccgtgcccgccttcctgaccgtcctgctgctattcctcccggacacgccccgcttctacgtcgcgcagggccgggacgagcaggcgatgagggccattcgcaggctgaggggcatccgggacgagtcgcgcctccgcgccgaggtggaggacatccggagcgcctacctgatggagcgggagatccacgcgggagtgcacctgagcgacatgttcaagggcccggacctccgccgcacgctgctcagctacggggccaacgtggccggcatcgcgacgggcgtcaccttcatgtccggcttctcggtctacctgttcgtgcaggcgcgcgtgggctcgccgttcgactgggtcatgatatccctcgcgatcgcgctgaccggaaacatgctggcgttcccggcgatgcgctgctttgggcggcgcgagctgctggtggtcgcctcgctcgtctcgtcggccgtgatgttcggcatggccgtcgtctacaccgtctcgggcgggcactcgccgggcgcgagcaaggcgctcgtcgcgctcagcatcgtctacacgtgggtgtacggcatcggccagggcccggtcctgtgggcgctcgggaccgagatcccctcgcaacggctgcgctcgcagacggtcggcaccgcgtcgggcctaaactttgtcgccgcctggctggtgtccttcttcacgccctacttcgttaaccccgaccggctggggtggggcccaaagtacgggtacatctggggtggaagcaatctcgtcgtcgccctgtgggcgttcttcttcgttcccgagaccaagggcagaagtctggagcagctggatgagctcttcgagaagggagcggccgctaggaagttttcttcattcactctggagcggcaactggtcgacgactattccggggagacgggtcggaagaggaacgacggcatcaaggacgaggaagttggcgtcgttcagttgctggaaaatcaagagaagaggtga

SEQ ID NO: 438 - protein, 1754 aa, Myceliophthora thermophilia
MRQRASLDILADDPGAPAVLDHAEPKIATGRRPKRDSRTSSSSSSPAPPDHEESDFFLAGNDSQSSLGVPNFQDMQVTDDECLPPVHRLPNEILIAIFAKLSSSSDLLHVMLTCKRWARNAVDILWHRPSCSTWEKHQIICQTLSLENPYFSYRDFVRRLNLAALADKVNDGSVQPLAECTRVERLTLTGCSNLTDSGIIALVKNNKHLYSLDVSLSATTNTGGPVFRDHITEASIDAITENCPRLQGLNISGCQRVSNESLVRLAQRCKYLKRLKLNDCTQLQDSAVLAFAENCPNILEIDLQQCRFIGNEPITALFTKGHALRELRLANCELIDDSAFLSLPSNRKYEHLRILDLSSSMGITDRAIEKIIEVAPRLRNLVLQKCRNLTDAAVYAISRLERNLHFLHLGHCNQITDDGVKRLVSMCTRIRYIDLGCCTNLTDDSVTRLANLPKLKRIGLVKCANITDASVIALANANRRPRMRRDAHGNLIPGEYSSSQSCLERVHLSYCTNLTQTSIIRLLNSCPRLTHLSLTGVQAFLREDLERYSRPAPPEFTDHQRSVFCVFSGQGVVGLRKHFNRFIAAAEESRRANRAVIQADAPIFPPAPQGVLIDVSVPVDDGDPDGLDDDDVPEDGSEMVVDTQPLLGHHNIGHGHHPMAAGAIPVVPPPIPTMAQALPLGGSTVPAANVEEQATTFPTPGVHPPPDTTAPGSSSPSGPGEVGGADEDDVVQEAANAAGQGSTTIGMDAHGSGGSMRVSVIVPVDTSIQPEPNAQPGPGQEVQGAGGLSAWIASFTLLSLLSSRFGSCAVASSSGSSPILDNGLQHEIQWDRHSIVIGGDRLFLFGGEMHPFRLPVPELWEGILQKIKAMGLRMVSIYIHWGFHAPAPGKAVREGENVLLVVHDDTGHDQLNAAVNPRRALNATLLGGAPDRAGLDRVRTRYNEGGLAAERLGWHLRGFDDSAWETAEGPWLGSRAPACASTAGGCRWTCRGGSTCPSRSALKPAEEDVERGTLEYTVLLFVNGWQYGSGDNLIGLAVWSLQEEGARVDVDVVVGYVADSSLDVKFDGSYLRPGWDPDFWNKILETNSNWVAEMPDPDETMKHFGARTCGADSGLATGNSDEVTSLPTQLRALNGHWTLGAKMCHRIGCRENTGLYWCNLHGSHIRDMCCHGSDGCLYSGDPMSGVEAFPDSDREAAHTRILAGYDHCSDPANVDPLIYRFPGKLGTMAESAVSKRRILTERRVVFICFLVALGQFQYGYDSAAVAGFQSMPGFLAVYGYADPANPIGFNIHTDVQRLIQSLMNVGGFLAAVAIYAAHTRVSRRAGLWAGCAFAFVSISLQLGLRSLAGLYAGRLLLGVSNGLLVPYCVTYMAESAPSLLRGPVVGMSTFQTSLGALLGILVDNYCQPHGGAVSWMIPLAVMYAVPAFLTVLLLFLPDTPRFYVAQGRDEQAMRAIRRLRGIRDESRLRAEVEDIRSAYLMEREIHAGVHLSDMFKGPDLRRTLLSYGANVAGIATGVTFMSGFSVYLFVQARVGSPFDWVMISLAIALTGNMLAFPAMRCFGRRELLVVASLVSSAVMFGMAVVYTVSGGHSPGASKALVALSIVYTWVYGIGQGPVLWALGTEIPSQRLRSQTVGTASGLNFVAAWLVSFFTPYFVNPDRLGWGPKYGYIWGGSNLVVALWAFFFVPETKGRSLEQLDELFEKGAAARKFSSFTLERQLVDDYSGETGRKRNDGIKDEEVGVVQLLENQEKR

SEQ ID NO: 439 - DNA, 2637 bp, Myceliophthora thermophilia
  CDS (1)...(2637)
atgaggatgcggagcttactggtgctcgcggccatcggcctggccgctgccgaggacggcctcaacggctggcttcgctatgcgcggatcaagggagcacgcgatttccacgacaggctgccgtctaccattgtcgcactcaacgccaccgaggggctccccgtctacacggccggccaggagctcgcccagggcatcgagggcatcttcggcaagaaggtcgacctcgacgtcgacctcgcaacggccggcgccggcaagagtaacggcaagggcaagggcaatggcaagggcaaaggaaagggcaacaacggccacggccacgaccgcgacaccaccgccacggttgggacggtcgcggcgtatgtcgacagcaaccccggcgctgctgccgccggcatccccgagctggccgacgacggcttctacctccgggtctcgcgcggtaacgtcctgatcctcggccagaacgagcgcggcgccctgtacggcgccttccactacctctcgctgctcgcgcagggcaacgcatccgactacacgctggcgtccaacccggacgcgccgatccggtgggtgaaccagtgggacaacatgcaggacggcggcacccacggcagcgtcgagcgcggctacgggggcgactccatcttcttctgggacggcaaggtccgcgacgacctgacccgggccggactctacgcccgcctgctcgcctccatcggcgtcaacgcggtcgtcgtcaacaacgtcaacgccgaccccaagacgctgacgcccgagaacatggacggcctggcccgcatcgccaacgccttccggccctacggcgtccagctgggcgtctcgctcaacttcgcctcgccccagaccctcggcggactcgacagcttcgaccccctggacgagcgagtggtggagtggtggcgggacatcaccgacgccctctacgagcggatccccgacatggccggctacctggtcaaggccagctcggagggccagcccggccccttgacgtacaaccggacgctcgccgacggcgccaacctgttcgcgcgcgccctcaagccgcacggcggccgcgtcctgttccgcgccttcgtctacgaccacaccagcctggacgaggacaaggactggaaggcggaccgggccaaggcggcggtcgagtacttcgacggcctcgacggcaagttcgaggacaacgtggtgatccagatcaagtacggccccatcgacttccaggtgcgcgagcccgcgtcccccctcttctcgcgcctggtccgcaccgcctccgccctcgagctgcagatcacgcaggaatacctcggccagcaggcccacctcgtctacctggcgcccatgtggaaggagatcctcgacttcgacttccgcgtcgacggccggccctcgcgcaccgccgacatcctcaacggcaagcgcttcggccgccgccgcgcgggcggctacgccggcgtcgccaacgtcggcaccaacacgacctggctgggcagccacctggccatgtccaacctgtacgccttcggccgcctcgcctgggacccgtcgtccgagcccgagagcgtcctccgcgactggatccggctgaccttcggcgacgacccgaaggtgctcgacgtcatcacgcgcatgtcgatggcctcgtggccggcctacgagaactacagcggcaacctgggcatccagacgctgaccgacatcctgctgggccactacggcccgaacccggcctcgcaggacggcaacccgtggggccagtggacgcgcgccgacgccgacagcatcggcatggaccgcaccgtctggaacggcaccggcttctcgggccagtacccgcccgaggtcgcggcccggttcgagaggatcgagacgacgccggacgagctgctgctctggttccaccacgtcccctacacgcacgtcctcaagtccggcaagacggtcatccagcacttctacgacgcccactacgagggcagcgccgtggcccagaccttcccgcgcctgtgggagacgctccggggccgggtggacgacgagcggttcgagcacgtcctgttccggctcgagtaccaggccggccacgcgctcgtctggcgcgacagcatcaacaacttctacttcaacaagtccggcatccccgacgcccgcggccgcgtcggccaccacccgtaccgcatcgaggccgagcacatgcggctggacggctacgtcccctacgacgtgagccccttcgaggccgccagcggcgcccgctgcgtcgtgacgcgcgacaactcgaccgccaccgccgccaccgccagcgtcgagctgcgccacgtgcccacgggcacctacgacgtcgccgtcaactactacgacatggccatcggcaactccacctgggagctctacatcggccgccgccgcgtcggccgctggaagggcgacctcgaatacaacctcggccgcgccccgtccccctacatcgacggccagaccgccgcccgcgtcaccttccgccgcgtccacatcgagaggggcagcaccctcaagatcgtcggcaggccggacggcctggagcccgcccccatcgactacgtctccatcctgccgctgggcattgtcgactaa

SEQ ID NO: 440 - protein, 878 aa, Myceliophthora thermophilia
MRMRSLLVLAAIGLAAAEDGLNGWLRYARIKGARDFHDRLPSTIVALNATEGLPVYTAGQELAQGIEGIFGKKVDLDVDLATAGAGKSNGKGKGNGKGKGKGNNGHGHDRDTTATVGTVAAYVDSNPGAAAAGIPELADDGFYLRVSRGNVLILGQNERGALYGAFHYLSLLAQGNASDYTLASNPDAPIRWVNQWDNMQDGGTHGSVERGYGGDSIFFWDGKVRDDLTRAGLYARLLASIGVNAVVVNNVNADPKTLTPENMDGLARIANAFRPYGVQLGVSLNFASPQTLGGLDSFDPLDERVVEWWRDITDALYERIPDMAGYLVKASSEGQPGPLTYNRTLADGANLFARALKPHGGRVLFRAFVYDHTSLDEDKDWKADRAKAAVEYFDGLDGKFEDNVVIQIKYGPIDFQVREPASPLFSRLVRTASALELQITQEYLGQQAHLVYLAPMWKEILDFDFRVDGRPSRTADILNGKRFGRRRAGGYAGVANVGTNTTWLGSHLAMSNLYAFGRLAWDPSSEPESVLRDWIRLTFGDDPKVLDVITRMSMASWPAYENYSGNLGIQTLTDILLGHYGPNPASQDGNPWGQWTRADADSIGMDRTVWNGTGFSGQYPPEVAARFERIETTPDELLLWFHHVPYTHVLKSGKTVIQHFYDAHYEGSAVAQTFPRLWETLRGRVDDERFEHVLFRLEYQAGHALVWRDSINNFYFNKSGIPDARGRVGHHPYRIEAEHMRLDGYVPYDVSPFEAASGARCVVTRDNSTATAATASVELRHVPTGTYDVAVNYYDMAIGNSTWELYIGRRRVGRWKGDLEYNLGRAPSPYIDGQTAARVTFRRVHIERGSTLKIVGRPDGLEPAPIDYVSILPLGIVD

SEQ ID NO: 441 - DNA, 1392 bp, Myceliophthora thermophilia
  CDS (1)...(1392)
atgaagtcccttgctctcttcctatcggctgccgcctcgctggtttcggcgtccgccatcgccctcgatcgtgaagctattccagccggggcgtcgataacatttccccgtcatgaatctcagttcaacccatccgtgacacttgaaggcaggggccacggcaggggtcacggcagggagaaggacaactggggcaacgctgtcgaaaaggaccgccagaaggtcactatccgcgcgtccaagcacgaccgcgatgatatcagtgacgacttcctctgggcactcaagaaggcgaaccatggcggcctactgcatctgcagaaggggaagaaatatgtaattggcaagaagctggatctgagttttctgaacgatatctatgtcaagatcgacggtgagctaaagttcaccaacgacattgaatactggcaggccaacaacttctactatgacttccagaagagcattaccttctgggtctggggtggcaaggatatcaagatatacggctccggcgtcatcaacggcaacggccaggcatggtgggacggcttctcgggccacgagattctcgaccccgacaatgagtactaccggcccattctgtttctgaccgacaacgccaccaacgtcgaggttcgcggcctgcacctcaaggactcgccgtgctggaccaacttctttgtgcgttccaagaacattgttttcgacgacgtctacatctctgccgtgtctaccaacgcatcgaccctgcccaagaacacggacggtttcgactcgctcaacgtctcgggcctgaccgtgctcaacacgcgcgtcaacgtgggcgacgactgcttctcgcccaagcccaacacgtccgacatcctggtgcgcaacctgtggtgcaacgggacgcacggggtgagcatgggcagcatcgggcagtacgcgggcgtgctggactacatcgcggacgcgcacatcgagaacgtgacgctgctcaacggcgagaacggggcgcggctcaaggcctgggccggcccggacgtcgggtacggctacatccgcaacgtcacctacaaggacatccgggtcgagaacaccgactcccccatcgtgctcgaccagtgctacttcaacgtcaacgagaccgtctgcgcgcagtatccgagcagggtcaacatcaccgacatcaacttcatcaacgtgcgcggcaccagcagcggtaaggaggggagggtcgtggcggacctcacctgctcccccggcgcgacctgtactggcatccatctggaggggatcgacatcaccagccccaagggctcgcccccgcagattgtgtgtgagaacatcgagggagatatcggcgttgactgtatccccaaggacgaggcggactattcaggttga

SEQ ID NO: 442 - protein, 463 aa, Myceliophthora thermophilia
MKSLALFLSAAASLVSASAIALDREAIPAGASITFPRHESQFNPSVTLEGRGHGRGHGREKDNWGNAVEKDRQKVTIRASKHDRDDISDDFLWALKKANHGGLLHLQKGKKYVIGKKLDLSFLNDIYVKIDGELKFTNDIEYWQANNFYYDFQKSITFWVWGGKDIKIYGSGVINGNGQAWWDGFSGHEILDPDNEYYRPILFLTDNATNVEVRGLHLKDSPCWTNFFVRSKNIVFDDVYISAVSTNASTLPKNTDGFDSLNVSGLTVLNTRVNVGDDCFSPKPNTSDILVRNLWCNGTHGVSMGSIGQYAGVLDYIADAHIENVTLLNGENGARLKAWAGPDVGYGYIRNVTYKDIRVENTDSPIVLDQCYFNVNETVCAQYPSRVNITDINFINVRGTSSGKEGRVVADLTCSPGATCTGIHLEGIDITSPKGSPPQIVCENIEGDIGVDCIPKDEADYSG

SEQ ID NO: 443 - DNA, 1507 bp, Myceliophthora thermophilia
  CDS (1)...(1506)
gccgcggccgcggcggtcaacaaaaacatccaggcggcgtcggcgccccatccggcggggccgtggacgtacctcgcctcggccgacccgctgccctcggccggcgcgtgggcgctgtccggccccgacgcgcaggtctgggcgccctcggtggcccggctcaacgcgtcggcgtacgtgctgtactacgccgcgttgctggcgccggggtacgtggggagcgcggcaaatgaggggaactcctcgtcatcgtcatcgtcatcctcatcctcatcgtcatcatcgtcctcggcctcggcctcgcgcctgcactgcatcggggcagcgacgtcgacgacgtcgtcgccgctgggaccgtaccggccgcagcgggagccggtcatctgcccggccggggagggcggggcgatcgacccggccgggttcgcggacccggcgacggggcggcggtacgtggcgtacaaggtggacggcaacgcgctcgggcggggcggggagtgcaacaacggggtggcgccctcgcggcggacgccgctcgtgctgcaggaagtggaagtggacggcgccgagggcgtccgcccggtcgggcccgccgccgagatcctcgaccgcgacgccgacgccgacggcccgctcgtcgaggcgcccgacctactgtatttaccgccttccagggacgcggacgcggacgcggacggggatgggggcaggagccggccggggaggtacgtgctgttttacagcaaccgctgctgggacgggcccgggtacagcgtcaactacgcggtggcggaggggagcatcatggggccgtacaagcgggcggcggggagcggcgagggcccgcccctgatcgggacgggggaccggttcgacgtcacggctcccgggggcgcggccagcgtgccgggcggggactggctgctgtttcacgggaactgtccgcaggggaggtgtctgtttggggccgagatggaggtggtcacgccgaactcgccttgtgcctcggtatgccaggacttgcgtggtctcgacccttcggatccggactcctccacgacgaggaactcggacattacctgcgaagatgccgactactcgagcgctgccggcaccaagttcaagaagtgcatgacctgcctgcaaactagcacattctcccaggacggcgagagtgataccatgtggttcctctacaatctgaggtacacggccgcctactgtgtctttggttatcccaacgccaccaacttctcgcccacgccatgcaccactaggaccgcctgcggcgacctcgaggccaacatgcgccacggcatcccgaaccccaagggtaccaccgcctactcgtactgccacgcgggcgacggcaacgcaatggacttctcccacttcgagagctgcatcgcttgcacctccgccctcgggaccaccgactacctggccaactactttgccgccctcggagtcgcctgccagcagcagcccgccccgggcacactgctca

SEQ ID NO: 444 - protein, 502 aa, Myceliophthora thermophilia
AAAAAVNKNIQAASAPHPAGPWTYLASADPLPSAGAWALSGPDAQVWAPSVARLNASAYVLYYAALLAPGYVGSAANEGNSSSSSSSSSSSSSSSSSASASRLHCIGAATSTTSSPLGPYRPQREPVICPAGEGGAIDPAGFADPATGRRYVAYKVDGNALGRGGECNNGVAPSRRTPLVLQEVEVDGAEGVRPVGPAAEILDRDADADGPLVEAPDLLYLPPSRDADADADGDGGRSRPGRYVLFYSNRCWDGPGYSVNYAVAEGSIMGPYKRAAGSGEGPPLIGTGDRFDVTAPGGAASVPGGDWLLFHGNCPQGRCLFGAEMEVVTPNSPCASVCQDLRGLDPSDPDSSTTRNSDITCEDADYSSAAGTKFKKCMTCLQTSTFSQDGESDTMWFLYNLRYTAAYCVFGYPNATNFSPTPCTTRTACGDLEANMRHGIPNPKGTTAYSYCHAGDGNAMDFSHFESCIACTSALGTTDYLANYFAALGVACQQQPAPGTLL

SEQ ID NO: 445 - DNA, 1581 bp, Myceliophthora thermophilia
  CDS (1)...(1581)
atgttggacgtcgtcgcgctgagtatagggttagcggcagcgctcgcttatgtcgtgttggaatatccccggcttcaccagagctggcggttgtggtcacaccgctcccagctgccgccgggacccaagaagatcaagacggggatccgcaagccatggctctggttccgcgagctacacaagcagtacggcgacgtggtcttcctccagatggggcccacgccgaccgtcgtcctgggctctgcgcaggccgcctgggacctgctcgagaagcgcggggccatctactcttcccggccgcgcttcatcatgggcggcgagctgctctccgacggcctgcgcggcctgatggccccctactcggccttctggcgccgctggcgcaagctcctccacagcggcttcatgcagcgccagagcgagtcgtaccgccccatccagagcctcgagtccaaggtgctcatgcacgacctcctgaccaaccccgaggactaccgcacccacctggagcgatatgccgcctccgtcatcgtcaccgtcacctacggccgcagagtcgaggacgtccggaccgacgccgtcgttcgcatgaacgccgaggccatggaacggctcactttggtaaatatccctggcaagtatgcagtcgagcgttatcctgcgctcaaacacatcccttccctgtttgccccctggaaggcacaggtgctggaacagcggaagaaggacatcaaaatgtatatgggactcatggacgatgtcaagaagaggatggcagcgggaacgctgccggactgctttgccaagcatatcctggaggaacaagagaacctcggcatgaccgatcttgaggtggcctacacggccggaagtcctttcggtgccggtgtcgaaacatccgccggttcgctggccagcttcttactcgcatgtgtcaagtttggcgacagcttcatcccgagagctcaggcggagctcgacagggtcgtgggcagtgacaggcttcccacgtttgatgacttgccgtccctggagtatgtgcgagcaatcgtgtccgagactctccgctggcgccccgtcgccgttctcggcggcactccacacgcaagcacggccgacgacgtgtacaaggggatgttcattcccaaggggagcaccatcattgccccgttgtggagcagctccgtctcagtccatctaaacgaggccgacttcccggacccgcacagcttccaaccagagcgcttcctcggacaacgcgagtatcccggaaatctgggccacagcgcgtttggctggggccgccgcatctgtcccggaatgcatctcggatcggcatccgttgctatcaatatcgcccggatactatgggcatttgatgtcaggcctgcccggaacgagaaaggagagccgatcgatgtggacattttcgcgttctcggacggattcaactcgactccgctcccatttgaatgctccatcactccccgctcggacaagcatgcgcgcgtggtcgaggacgagtaccgaagggcccttggtgagttgcagcagtactcggctgcagcaaccggtatgtga

SEQ ID NO: 446 - protein, 526 aa, Myceliophthora thermophilia
MLDVVALSIGLAAALAYVVLEYPRLHQSWRLWSHRSQLPPGPKKIKTGIRKPWLWFRELHKQYGDVVFLQMGPTPTVVLGSAQAAWDLLEKRGAIYSSRPRFIMGGELLSDGLRGLMAPYSAFWRRWRKLLHSGFMQRQSESYRPIQSLESKVLMHDLLTNPEDYRTHLERYAASVIVTVTYGRRVEDVRTDAVVRMNAEAMERLTLVNIPGKYAVERYPALKHIPSLFAPWKAQVLEQRKKDIKMYMGLMDDVKKRMAAGTLPDCFAKHILEEQENLGMTDLEVAYTAGSPFGAGVETSAGSLASFLLACVKFGDSFIPRAQAELDRVVGSDRLPTFDDLPSLEYVRAIVSETLRWRPVAVLGGTPHASTADDVYKGMFIPKGSTIIAPLWSSSVSVHLNEADFPDPHSFQPERFLGQREYPGNLGHSAFGWGRRICPGMHLGSASVAINIARILWAFDVRPARNEKGEPIDVDIFAFSDGFNSTPLPFECSITPRSDKHARVVEDEYRRALGELQQYSAAATGM

SEQ ID NO: 447 - DNA, 642 bp, Myceliophthora thermophilia
  CDS (1)...(642)
atgaaggtcaccgccgttgccgttcccgtcctggctggcattgccagcgccaaccccgtcgacgtcgaggcccgccagtcgtgccccgaggtccacgtattcggcgcccgggaaactacagcaccccctggctatggcacatcccaaggcctcgtcaacatggtcgtgcaggcgtaccccggagcaacaagcgaggccataaactaccccgcatgcggcggtgcatccgttgcggttgtctccgctgtgacgagctttaaccagcgctgccctgacacaaagatcgtcttgatcggctattcgcagggtggccagatcatggacaacgcctactgcggcggcgccggtgccaccctcagcggcagcgccctcaacgccgttaaagccacggtctggttcggaaatccgcattatctgagccaattaagttatcgagttgggacatgccaggccggagggttcgcggcccgccctcccggattccaatgttcgcctggtaacccagataacatcaagtcgtactgcgatgccgaggatccgtactgctgcaatggaaacgatgcaaaccaccaccaacagtacgtcaccatctacggccagcaggcgctcgccttcatcaagtcgaagctcgacgctgcttaa

SEQ ID NO: 448 - protein, 213 aa, Myceliophthora thermophilia
MKVTAVAVPVLAGIASANPVDVEARQSCPEVHVFGARETTAPPGYGTSQGLVNMVVQAYPGATSEAINYPACGGASVAVVSAVTSFNQRCPDTKIVLIGYSQGGQIMDNAYCGGAGATLSGSALNAVKATVWFGNPHYLSQLSYRVGTCQAGGFAARPPGFQCSPGNPDNIKSYCDAEDPYCCNGNDANHHQQYVTIYGQQALAFIKSKLDAA

SEQ ID NO: 449 - DNA, 1968 bp, Myceliophthora thermophilia
  CDS (1)...(1968)
atggagctgcttcgagtctccctcgccgctgttgcactctccccattaatattattcggcgttgcagccgcccaccctaccgcccgatccattgcccgctccacgattcttgacggagccgatggccttcttccggagtatgactacatcatcatcgggggcggcacgtccggattgactgtcgccgacagactcacggagaatagaaagcgcaagttttcccgctctcccctcccaacgtcacccgcccgatcgtcaccggcgtggtgttattctgttcttgttttggaaagaggcattttccagaactctagctcggtgaccaccatttctgggggaagcagaggcctcttcgatccaagtctgaccttcaacatcaactccgttccccaagctgggctggacaaccgcagcattgccgtcattggcgggttgatcctcggcggcagctccggcgtcaacgggcttcaagtcctccgtggacaaagagaagactatgaccgctggggatcgtactttgggccaaactctgactggagttggaaaggtctcctgccgtatttcaagaaggcatggaatttccatccgcccaggccagagctggtcagtcagttcgacatcaagtacgaccccagctactggggcaacacgtctgacgtgcacgcatctttcccaaccactttctggccggtgctcaaattggagatggctgcatttggtgacatccctggggtcgaatatccgcccgactctgcttctggcgagaccggggcgtattggcacccagcgtccgttgacccagcgacagtcctccgctccttcgctcggcccgcgcattgggacaacattgaggcggcacgtcccaattaccacaccctgaccgggcaacgcgtattgaaggtcgcatttgatggcaatcgagcgaccagcgtcgtcttcgtgccggcgaatgcaacggatcacagcactgccaggtccgtgaaggccaagaaggagatcgtcttggccgccggcgccattcacacgccccaaatcctacaggcgagcggagtagggccgaagcaggtcctgaaggaagcaggcgtgccgcttgtcgttgacgctcccggtgtcggcagcaatttccaagaccagccgtatgtggttgctcccaccttcaattttaccaagttccccttccacccggacttctacgacatgattctgaaccagacttttatcgccgaggctcaggcccagtttgaaaaggaccgtaccggacctcacaccatcgcatccggctattgcggcagctggctccccctccagatcattgccccaaattcgtggaaggacatcgctaggcggtacgaatcccaagacccagccgcctacctccccgccggcaccgatgagaccgtcatcgaggggtacagggcgcagcagaaagcactagcgaggtccatgaggagcaagcaatcggcaatgtataacttcttcctgaggggcggctacgaagagggttctgtcgtctacttgcacccaaccagccgtggcaccgttcgcatcaaccgatccgaccccttcttctcgccgcccgaggtcgactacagggcactgagcaaccctaccgacctggaggtcctgctcgaattcactcccttcacccgcaggtacttcttggagacgaggttgaagtccctcgacccggtcgagctgtcgcccggtgccaacgtcacggcgcccgccgacatcgaggcctggcttcgcagcgtcatgatcccgtcctccttccatcccatcggcacggccgccatgttgcctaggcacctcggtggtgtcgtggacgagaaccttctggtgtacggggtcgaaggcttgagtgtcgtcgacgccagcgtcatgcccgacttgccgggctcatacacgcagcagaccgtgtatgctattgctgagaaggccgcggatctcattaagagcagggcttga

SEQ ID NO: 450 - protein, 655 aa, Myceliophthora thermophilia
MELLRVSLAAVALSPLILFGVAAAHPTARSIARSTILDGADGLLPEYDYIIIGGGTSGLTVADRLTENRKRKFSRSPLPTSPARSSPAWCYSVLVLERGIFQNSSSVTTISGGSRGLFDPSLTFNINSVPQAGLDNRSIAVIGGLILGGSSGVNGLQVLRGQREDYDRWGSYFGPNSDWSWKGLLPYFKKAWNFHPPRPELVSQFDIKYDPSYWGNTSDVHASFPTTFWPVLKLEMAAFGDIPGVEYPPDSASGETGAYWHPASVDPATVLRSFARPAHWDNIEAARPNYHTLTGQRVLKVAFDGNRATSVVFVPANATDHSTARSVKAKKEIVLAAGAIHTPQILQASGVGPKQVLKEAGVPLVVDAPGVGSNFQDQPYVVAPTFNFTKFPFHPDFYDMILNQTFIAEAQAQFEKDRTGPHTIASGYCGSWLPLQIIAPNSWKDIARRYESQDPAAYLPAGTDETVIEGYRAQQKALARSMRSKQSAMYNFFLRGGYEEGSVVYLHPTSRGTVRINRSDPFFSPPEVDYRALSNPTDLEVLLEFTPFTRRYFLETRLKSLDPVELSPGANVTAPADIEAWLRSVMIPSSFHPIGTAAMLPRHLGGVVDENLLVYGVEGLSVVDASVMPDLPGSYTQQTVYAIAEKAADLIKSRA

SEQ ID NO: 451 - DNA, 1737 bp, Myceliophthora thermophilia
  CDS (1)...(1737)
atgcaagttgcttcaaagttggtagccgtcactggcggtgccctggcgctctggctacatccagtggcagcacaggaaggatgtaccaacatctcctccaccgagacgtacgattacatcgttgtgggatccggtgctggcggtatccctgttgcggatcgcctgagcgaagctggccacaaggttctcctgatcgagaagggtccgccgtcgacggggagatggggtggaataatgaaaccggagtggctaatcggtacgaacctgacccgcttcgacgtcccgggtctctgcaaccagatctgggccgacccaaccggggccatctgcaccgacgtcgaccagatggcggggtgtatgctaggaggagggacagcggtcaacgccggactgtggtggaagccgcaccctgccgactgggacgtcaacttccccgagggttggcacagcgaggacatggcggaggccacagaacgcgtgtttgagcggatccccggcaccatcaccccgtcgatggacggcaagcggtacctctcgcagggcttcgacatgctgggcggcagcctcgaagctgccggctgggagtacctcgtccccaacgagcacccggacaggaagaaccgcacatacgggcacagcaccttcatgtactcgggcggagagaggggcgggcccctggccacatacctcgtctcggcggttcagcgcgagggctttacgctgtggatgaacacgactgtgacgcgcatcatccgggaaggcggccatgctacgggcgtcgaggtgcagtgcagcaacagcgaggcaggtcaggccggcatcgtcccgctcacccccaagaccggccgggttattgtctccgcgggagcattcggctcggcgaagctgctcttccgaagcggtatcggaccgaaggaccaactcaatattgtcaagaactcaaccgatgggcctagcatgatttcggaggaccagtggatcgaattgccggttggctacaacctcaatgatcacgtcgggaccgacattgaaatagcacacccggatgtcgtcttctacgactactatggggcttgggacgagcccatcgtcgaggataccgaaagatatgtggccaacaggaccggtcctctggcgcaagctgcaccaaatattggcccgatcttctgggagaccataaaggggagcgacggtgtctctcgtcacctgcaatggcaggcgagggtcgagggaaaactcaacacctccatgacgatcacccagtatttgggcacaggctcccgatctcgaggccggatgactatcacgaggcggttgaatacggtagtctcgacccctccatacctccgagatgagtatgacagggaggccgtcatccagggcatcgccaacctgcgagagtcattgaaaggggtggccaacctgacatggattactccgccgtcgaacgtgacggtggaggatttcgtggactcgatcccggctactccggcgcgccgttgctccaaccactggataggcacggccaagattggcctcgacgacgggcgggaggggggcacgtcggtggtggaccttaacactaaggtgtacgggactgacaatatctttgtcgtcgacgcatccatcttccccggccacatcacaggcaatccctcggcagccattgtgatcgcggccgagtatgcggcggccaagatacttgcgctaccggccccggaggatgcggcatcgtga

SEQ ID NO: 452 - protein, 578 aa, Myceliophthora thermophilia
MQVASKLVAVTGGALALWLHPVAAQEGCTNISSTETYDYIVVGSGAGGIPVADRLSEAGHKVLLIEKGPPSTGRWGGIMKPEWLIGTNLTRFDVPGLCNQIWADPTGAICTDVDQMAGCMLGGGTAVNAGLWWKPHPADWDVNFPEGWHSEDMAEATERVFERIPGTITPSMDGKRYLSQGFDMLGGSLEAAGWEYLVPNEHPDRKNRTYGHSTFMYSGGERGGPLATYLVSAVQREGFTLWMNTTVTRIIREGGHATGVEVQCSNSEAGQAGIVPLTPKTGRVIVSAGAFGSAKLLFRSGIGPKDQLNIVKNSTDGPSMISEDQWIELPVGYNLNDHVGTDIEIAHPDVVFYDYYGAWDEPIVEDTERYVANRTGPLAQAAPNIGPIFWETIKGSDGVSRHLQWQARVEGKLNTSMTITQYLGTGSRSRGRMTITRRLNTVVSTPPYLRDEYDREAVIQGIANLRESLKGVANLTWITPPSNVTVEDFVDSIPATPARRCSNHWIGTAKIGLDDGREGGTSVVDLNTKVYGTDNIFVVDASIFPGHITGNPSAAIVIAAEYAAAKILALPAPEDAAS

SEQ ID NO: 453 - DNA, 1326 bp, Myceliophthora thermophilia
  CDS (1)...(1326)
atgggcggcgactcgtttccccgtcgcccgccgtccggcatcaaggtgatcgtcgtcggcgccggcttcgccgggctggcggcggcgatcgagtgcgaccgcaaggggcactcggtgacgctcctggagaaggcggagaacatggacgacatgatgcggatcggcgacatcatcagcttcgacccgaacgggtctaaggcgtttgagcggtggcccggggtggtcgaggccatggaggcggtggcccggcagacgacctggctggacctgtaccaccaccagggccgcttcgtcacccggcagtccttcgcgggcgagcgggcctgggggcggcgcatcaacggccaccgcggcgagctgcacaacatcatctaccgccacgccgtcgcccggggcatcgacatccgcctgggctgccgcgtcgaggactacttcgagacggacgaccccccgcaggcgggcgtggtgctggcgggcagcggcggcggcgagcgcctgtcggccgacgtcgtcgtcgcggccgagggggtgcgctcgcggggccgcaagatcgtcctgggctcggacgagaacccgaaatcgtccggctacgccgtctaccgggcctggttcccggccgaccgcatccgcgacaaccccgtcgtccggcacctggtggcccacggcgacacgcaccagggctacatcggcccggacgtccacttcctcgcctcgagcctcaagaacgggtccgaggtcaactgggtcttcacccacgtcgacgacggcaacatcgacgagagctggcagttccccggccggcccgaggaggcgctccgctacctcgacggctggagccccgtcgtgcgcgagctggtcaaggcgacgccggatgacgggcgcctgatcgaccacaagctcgtgtaccgcgacccgctgccgaccttcgtctccccgcgcgcgcgcacctgcctgatcggcgacgccgcccaccctttcctgcccacctcgatccagggggccagccagtcgatcgaggacggcgtcgtgctggccgcctgcctcgagctggccggcgcccgcggcgacgacatcatccccaccgccctgcgcgcctacgagaggctgcggtacgagcgcgtccaccgcgcccaggccacggggcccaagacgcgcgagcgctggcacaaggccgactggtcccgcgtctgggagaacccggacctcatccacctcgtccgcgaggagtggctgctcaactttgacgccgaaaaggacgcctaccagaggtatccccgggtcgtcgccgagttgggggtggggccgccgctacggccgcgcctctga

SEQ ID NO: 454 - protein, 441 aa, Myceliophthora thermophilia
MGGDSFPRRPPSGIKVIVVGAGFAGLAAAIECDRKGHSVTLLEKAENMDDMMRIGDIISFDPNGSKAFERWPGVVEAMEAVARQTTWLDLYHHQGRFVTRQSFAGERAWGRRINGHRGELHNIIYRHAVARGIDIRLGCRVEDYFETDDPPQAGVVLAGSGGGERLSADVVVAAEGVRSRGRKIVLGSDENPKSSGYAVYRAWFPADRIRDNPVVRHLVAHGDTHQGYIGPDVHFLASSLKNGSEVNWVFTHVDDGNIDESWQFPGRPEEALRYLDGWSPVVRELVKATPDDGRLIDHKLVYRDPLPTFVSPRARTCLIGDAAHPFLPTSIQGASQSIEDGVVLAACLELAGARGDDIIPTALRAYERLRYERVHRAQATGPKTRERWHKADWSRVWENPDLIHLVREEWLLNFDAEKDAYQRYPRVVAELGVGPPLRPRL

SEQ ID NO: 455 - DNA, 612 bp, Myceliophthora thermophilia
  CDS (1)...(612)
atggcacggctccagacactgctcgcaggcctcctcggcttgtccgtctcgacacaaacccagaccgcgactgcatcgcccgcaagtccccgagaggtcgaggcgcgacactggcccagccgagacaagtcgcatcaccacgactgcaacggcacccccgcgcccatcaaccagcggacggcgcaggaggtgattacgcagctcaaccttgtcccgaacgtggagaagggttactacgtcgagacgttccgggacgcctacaacgtgacggccgaccgctccgccagcacggccatctactacctactcgagggccgcgaaggccactccaactggcaccgcgtcgacgccgtcgaggtgtggcactactacgccggcgcccccctgaccctctccctcgcccgcgacgacggctcgcccgtgcgcgaggtcacgctcggcccggacgtctttgacggccagcagccccaggtcgccatcgccaagtgggagtggcagagggcccggagcctcggagagtggaccctcgtcggcaccaccgtcgcgccgggttttgacccgagcgggttcgaaatggctgaacctggctggacgccggacgcgtcccgataa

SEQ ID NO: 456 - protein, 203 aa, Myceliophthora thermophilia
MARLQTLLAGLLGLSVSTQTQTATASPASPREVEARHWPSRDKSHHHDCNGTPAPINQRTAQEVITQLNLVPNVEKGYYVETFRDAYNVTADRSASTAIYYLLEGREGHSNWHRVDAVEVWHYYAGAPLTLSLARDDGSPVREVTLGPDVFDGQQPQVAIAKWEWQRARSLGEWTLVGTTVAPGFDPSGFEMAEPGWTPDASR

SEQ ID NO: 457 - DNA, 519 bp, Myceliophthora thermophilia
  CDS (1)...(519)
atgccaaaggacttggccatcacggtggcctctctccgcggcgtgacggccgccacgccgtcgccgggatgcgggaagacgccgacgctgatcacggacgggtccgccacgactcccctgacgctgacctccaacggcaagacgcggcggttctacgtcaagcttcccgacgactacgacaacagccacccgtaccggctcatcttcgcgctgcacgccctcggcgggaccgcccagcaggtcaccaccgggacgggcggctacctgccgtggtacgggatccccgacctcgcggccaacgacacggtgggcgccgtctacgtggcgcccgacgggctcaacaacggctgggccaaccaggggggcgaggacgtggccttcctggaggccgtgatggagacggtggagcaggacgtgtgcgtcgaccgggacctgcgcttctcgaccggcttcagctacggcgccgccatgtcgtacacgctcgcgtgcgcgctcggccgccgcatccgggccgtctcc

SEQ ID NO: 458 - protein, 173 aa, Myceliophthora thermophilia
MPKDLAITVASLRGVTAATPSPGCGKTPTLITDGSATTPLTLTSNGKTRRFYVKLPDDYDNSHPYRLIFALHALGGTAQQVTTGTGGYLPWYGIPDLAANDTVGAVYVAPDGLNNGWANQGGEDVAFLEAVMETVEQDVCVDRDLRFSTGFSYGAAMSYTLACALGRRIRAVS

SEQ ID NO: 459 - DNA, 756 bp, Myceliophthora thermophilia
  CDS (1)...(756)
atgcgtctcctgcgatcgctcaccaagatggccgccatggccggcctggccgcggggcgcgtcactgcagccattgcggtctcgcccgccatcatcgttgctctgcatccctgtggaggatcggctcagggatggtactcgcagacacggctcccgtcgtacgcggaccagcttgggttcatcctcatctacgccggcacgaccaagatgagcaactacgcgctgaagcagtacaacggcgacgcgtcgagggtgtacgtcatggggggctcgtcgggggccatgatgaccaacgtgctggcgggctcgtacccggacgtgttcgaggccggcgcggccttctccggggtggcgcacgcgtgcttcctcggggccgactcggcgacgcccttctcgcctaaccagacgtgcgcgcagggccggatccagcggtcggcgcgcgagtggggggacctggtgcgcaactcgttcccggcctacgacggccgccgcccgcgcatgcagatcttccacggcaacgccgacttcctcgtccatcccgagtgcgcccaccaggccctcgcccagtgggccgacgtcctcggcctccagctgacccagaccaacaagggcgtgccctcggccgagtacacccaggaggtctacggcgacggcacccagctgcagggcttctttggcgacggcgtcggccacatcgccccggtcaacgagcccatcccgacattgtgctccgagtcaaccttggatgggaggtga

SEQ ID NO: 460 - protein, 251 aa, Myceliophthora thermophilia
MRLLRSLTKMAAMAGLAAGRVTAAIAVSPAIIVALHPCGGSAQGWYSQTRLPSYADQLGFILIYAGTTKMSNYALKQYNGDASRVYVMGGSSGAMMTNVLAGSYPDVFEAGAAFSGVAHACFLGADSATPFSPNQTCAQGRIQRSAREWGDLVRNSFPAYDGRRPRMQIFHGNADFLVHPECAHQALAQWADVLGLQLTQTNKGVPSAEYTQEVYGDGTQLQGFFGDGVGHIAPVNEPIPTLCSESTLDGR

SEQ ID NO: 461 - DNA, 798 bp, Myceliophthora thermophilia
  CDS (1)...(798)
atggccacattgcgcgccgaacagcaaatagagttcttccgcggcatcccctggtgcgccgcccacctctcgtccccctcgctcgtcatccaggaatccgtgtcgcaccgtcgcaagcctggcctcctcgacagcctcgtctcgcgcacactcaatcgcccggacgccctcccagcctacatcatattctaccacgtcccgccggcgtcatcatcggcacccacatccaccacctcatcaccatcgtcgccgtccataacagagtcaacaccctcatcacactcgcaacaacaacaacaacaacaacaacaacaaaagcagcagcaacaacaagagcgacccggtgcagcagcaacagcagcggcgacggaggatgagactgagcaaggggtagccgggccgctcatcaccgagatcaaggctctggtggcgctggggccgatgctgaacgggtggtgtcggaagctgtggagcttccaagcgtgggaaggggtgtgccacggcggaatggtggtgacgctgctggacgaggtcatgggccaggtgttcgcggccaaccggatgcacgggcggctgcccgccgacgcgcccgcgaccatgacgggctacctcaacacccgcttcgagcggcccgtccgcaccggccgcggcgccgacccggccgtcgtcctggtctcggcgcggctgcggcgccgcgagcggcgcaagttctggctcgacgccgacgtgagcggccccggcggcgaggtcatggcccgcgccgaggccctctttatcatgctgcggagcaagctataa

SEQ ID NO: 462 - protein, 265 aa, Myceliophthora thermophilia
MATLRAEQQIEFFRGIPWCAAHLSSPSLVIQESVSHRRKPGLLDSLVSRTLNRPDALPAYIIFYHVPPASSSAPTSTTSSPSSPSITESTPSSHSQQQQQQQQQQKQQQQQERPGAAATAAATEDETEQGVAGPLITEIKALVALGPMLNGWCRKLWSFQAWEGVCHGGMVVTLLDEVMGQVFAANRMHGRLPADAPATMTGYLNTRFERPVRTGRGADPAVVLVSARLRRRERRKFWLDADVSGPGGEVMARAEALFIMLRSKL

SEQ ID NO: 463 - DNA, 1809 bp, Myceliophthora thermophilia
  CDS (1)...(1809)
atgacgtacgactgtgacgtcctcatcgtgggggcgggcccagtcggcaccgctctagcgttggagctcgccctacaccgcgtatgcttccgcatagttgatcgggaacccatcaggaacgacaagagccgggcactgggcatccagccccggactctggagcttctcaaccgccatggagccgccgacacgatcgtccagagaggccgcatccttcgcggtgcggttacgcacatcgacagacagcgtgtttcccgccttaccctggatgacctcggcaccacggacaccgaattccccttgccccttatcctctcccaggtcgaaacggagaggtttctggatgagtgtctctccgagtatggcatgagcgttgagcgccccgtcatcgccagcaatatcatccagcacgacgccggagtcaccgtcactctcgagcgcccggacgggaagagcgacacaatacgtaccaagtacgtggtcggctgcgacggggctcacagtaccgtccgccatgcctccaagaagatgacctttcccggaggtgcctacccccaagactttgtcctttgcgacgcccgcttgcgggactccaacattgctcgagacagcctgagcgtctaccttaacaaccagggcctcgtcggcactctaccgctcgatcaggagctcgtccgcgtggttgtgtcgcggagtcccgtcgccgttccaggccaagaagcgcccaccctggaccagctgcaggcttacttcaccaccatgacgccgcccggctctggcacccttcacgatccactctggcttacccgcttccgccttcatcaccgctgcgtcaaccagtaccgcgacggccgcctcttcgtcgcgggcgacgccgcccacatccattctcccgccgccgggcagggcatgaacgcgggcatccaggactcgatcaacctgggctggaagctcgcgcgtgccctgtccctccaaaccgagtcggctctcccccgatcccaggcttgggccgcggctgacgccctcctcgacacgtacgatctagagcgccgccccgtcggcttgatgctgctccggggaacggaccgcatcttctccttcctcacagagcccaacccttggttcacgccgttccgcaacttccttatccggtttttcgccccgcgcatctcgcgcgatcgggcgtggaggaagtcggtgttccacttcatgtctcagtttggagtccactatcgcgggcgcacccggctcgtgggggaggcgagcggcttctggtggcgcccgaccatccggggcggcgatcggttaccggacgggaagatctggtccaagagcgaagcgagagagacgagcctgcagagagtatgcgtgggagcgccgcaccatctgctgctcttttccggaaatgctgcaagggggggcctgggagaggaggcgttgaggagcgcggcggacggggtggtggcagcctgcaagaccgagctccgggtacactacatcgccggcgatgacagaccgacgccgggacctgattggtacaccgattcggccggcaggttgcacgacaagtttgggttcgggaggaaggccgggtatgtgcttgtccgaccggacgggtacattgcccatattgggccgctgtctaagctgcggcagttactctcgttcctagacacgtaccttgtctcacccaacgtcgcgccgtctccatcaccctttacctatgtcaaacctcttgcttgggcggttgtggtcgcctatttcgcaccccaagtgataagatgggttgctcagagagtctggtcctga

SEQ ID NO: 464 - protein, 602 aa, Myceliophthora thermophilia
MTYDCDVLIVGAGPVGTALALELALHRVCFRIVDREPIRNDKSRALGIQPRTLELLNRHGAADTIVQRGRILRGAVTHIDRQRVSRLTLDDLGTTDTEFPLPLILSQVETERFLDECLSEYGMSVERPVIASNIIQHDAGVTVTLERPDGKSDTIRTKYVVGCDGAHSTVRHASKKMTFPGGAYPQDFVLCDARLRDSNIARDSLSVYLNNQGLVGTLPLDQELVRVVVSRSPVAVPGQEAPTLDQLQAYFTTMTPPGSGTLHDPLWLTRFRLHHRCVNQYRDGRLFVAGDAAHIHSPAAGQGMNAGIQDSINLGWKLARALSLQTESALPRSQAWAAADALLDTYDLERRPVGLMLLRGTDRIFSFLTEPNPWFTPFRNFLIRFFAPRISRDRAWRKSVFHFMSQFGVHYRGRTRLVGEASGFWWRPTIRGGDRLPDGKIWSKSEARETSLQRVCVGAPHHLLLFSGNAARGGLGEEALRSAADGVVAACKTELRVHYIAGDDRPTPGPDWYTDSAGRLHDKFGFGRKAGYVLVRPDGYIAHIGPLSKLRQLLSFLDTYLVSPNVAPSPSPFTYVKPLAWAVVVAYFAPQVIRWVAQRVWS

SEQ ID NO: 465 - DNA, 852 bp, Myceliophthora thermophilia
  CDS (1)...(852)
atgtttgacgagcaacccaacctcatccaagagtacgaattctcggaggaggatgactggccgtgggagaagcggagaagagcgccggtcccgctgttcctcatccacgacggcggcggcaccattttctcgtactactgcctccgcgagctcgaccgccccgtctacggcatcgctaaccccaacttcgactcgggcgccgcctgggccgggggcatccccgagatggcgcggcactaccgcgccttcatccgctcggccctcccctcgggcggggacgtcatcgtgggcgggtggtcgctcggcggcctcatctcgctcgagatcgcccaccagatcgccgaggaggcgaggcgttccccgccgggcgagccccgcctgagggtggtcgggatcgtcatggtggactcggtctgccccgtcatcgggaccgcgtcgtggcggccgatcgtggagcacaacattgtgtggagtgagaacacgcgggaggagaccaagcagaaggtgatgcgctgcttctcggaggcgctgaggatgaggggggaagagggcgacgacggggagagggcaccgccaccgctgcgacccccgcccgtcgtgctgcttcgcgccctcgaatgcgtcccagagcccggagaaggactgagcagggtggacgtctaccggtcggacccccagctcggttgggggctctacaggaaagatctgatcgccaaggtcatcgatattcccgggcaccatttcaacctcttccataccgaggagaacttggatgcaacgaccgaggcgatcaagaaggcttgtcgggaaatcgagatgagggccaactttggcagccatacttcggaatga

SEQ ID NO: 466 - protein, 283 aa, Myceliophthora thermophilia
MFDEQPNLIQEYEFSEEDDWPWEKRRRAPVPLFLIHDGGGTIFSYYCLRELDRPVYGIANPNFDSGAAWAGGIPEMARHYRAFIRSALPSGGDVIVGGWSLGGLISLEIAHQIAEEARRSPPGEPRLRVVGIVMVDSVCPVIGTASWRPIVEHNIVWSENTREETKQKVMRCFSEALRMRGEEGDDGERAPPPLRPPPVVLLRALECVPEPGEGLSRVDVYRSDPQLGWGLYRKDLIAKVIDIPGHHFNLFHTEENLDATTEAIKKACREIEMRANFGSHTSE

SEQ ID NO: 467 - DNA, 1749 bp, Myceliophthora thermophilia
  CDS (1)...(1749)
atgaacctgctcgccaccgttcatgaccgagcaccgctaatagtctacggaatatccgcacgtttgctctcgtcgattctgaaaccctccttcacactacggcgacgacgagtatcaatacagcagcccgtccgacggcagcaacagcaacagcaacaacaacaaagtattcgcactacagctaataccaccagcgccaccaagagattgtcctcgctcttccgcaatcccatcatggcccctcctatcgagcgggacccggccgtgccgctactgcgcgcccatctcacgccgctcccgcccttgtcggagtcgacggcggcgctcaccgacttcgtgtcccacctcctccggaccagcggacgggaggagccgaggatcgtgctgatcggcgacgcgtcccacgggacgtccgagttctacgaggcgcgggcggtgctgacgcagcacctgatcgagcgccacggcttcgccgtcgtggccgtggaggcggactggcccgacgccgaggccgtcgaccggtacgtgcggtaccggcccgagcccgggcccgggtccgggcccgcacttggggcgagcgagggaaagggggcggagacggagggggagacgcgcaaggccgggcgcgagcccgccttcctgcggttcccgacctggatgtggcgcaaccaggaggtccagcggttcaccgagtggctgcgccggcacaacctcggccgggacccgcgggcgcccgacgcggtcggcttctacgggctggacctctactcgctccgcgcgtccatgagggccgtggtcgagtacctggaccgcgtcgacccggccatggccgacgccgcgcgcgagcgctacgcccgcatgagcctctgggccgaggacccgcacgagtacggcctcgaggccctggccgccggcttccagggctgcgagaaggacgtgatgcgcgtgctccgggaccttctggccaggcggctcgagtacgcggccgagggccctgacggcgacgaatttcacagcggggagcagaacgcccgcgtggtcaaggatgccgagcagtactacaaggccatgtattacggccgcgacgagtcctggaacctgcgggaccgccacatgttcgagacgctcgtgcgcgtgctcaagcataggagccgggacgggcggccggccaaggcggtggtgtgggcgcacaacagtcaccttggggacgcgcgggcgacgagcatggggtggtcgcgcgacgagctcaacgtgggccagctctgccgggaggcgttcggcagcgccggggggcagcagcgggaagggggagggggccggagcgggagcgggagcgggagcggcggggggttggtgctcagcatcggctgcagcgggaacacgggcaccgtcgccgccgcccggcggtgggacggcgacatggaggtgatgcaggtccgcccgggtcttccgggaagctacgaggagctcctgcacgcgaccgggatcgagcggttcgccctggacctgcgccgcggccactgcgacgacgagctgcgcgaggccctgatgcgcaagcgcctcgagcgcttcatcggcgtcatctactccccccgcaccgagcggcagtcgcactactcctccgccgtcctgcccgagcagttcgacgccctcctctggttcgacaagaccagacacgtcggcgccctcgaggtccaccagccacacgtgcccctcgagtacgacgagacctggccgtttggcttgtga

SEQ ID NO: 468 - protein, 582 aa, Myceliophthora thermophilia
MNLLATVHDRAPLIVYGISARLLSSILKPSFTLRRRRVSIQQPVRRQQQQQQQQQSIRTTANTTSATKRLSSLFRNPIMAPPIERDPAVPLLRAHLTPLPPLSESTAALTDFVSHLLRTSGREEPRIVLIGDASHGTSEFYEARAVLTQHLIERHGFAVVAVEADWPDAEAVDRYVRYRPEPGPGSGPALGASEGKGAETEGETRKAGREPAFLRFPTWMWRNQEVQRFTEWLRRHNLGRDPRAPDAVGFYGLDLYSLRASMRAVVEYLDRVDPAMADAARERYARMSLWAEDPHEYGLEALAAGFQGCEKDVMRVLRDLLARRLEYAAEGPDGDEFHSGEQNARVVKDAEQYYKAMYYGRDESWNLRDRHMFETLVRVLKHRSRDGRPAKAVVWAHNSHLGDARATSMGWSRDELNVGQLCREAFGSAGGQQREGGGGRSGSGSGSGGGLVLSIGCSGNTGTVAAARRWDGDMEVMQVRPGLPGSYEELLHATGIERFALDLRRGHCDDELREALMRKRLERFIGVIYSPRTERQSHYSSAVLPEQFDALLWFDKTRHVGALEVHQPHVPLEYDETWPFGL

SEQ ID NO: 469 - DNA, 1314 bp, Myceliophthora thermophilia
  CDS (1)...(1314)
atgtccctcgctcgctgggcagctgttgctgcttcgttgctcctgttatcccctagcaccctcgctgttcccacgcacggaaatggcaagacgacgcgggatgccgtctcgcctcgagcagacgacgactggcactgggtagccacatggacatccatgccgcagctggtcgaaccgaacaacatgcctccggcaccctttaccggcggcggtgccgtgttcagggacgccaccctgcgccagacggttcacctgtccatcggagccgagcgcctacgtctgcagatcggcaacaccttcggcggtagcgacctgcccattaccgcggccaccatcgccctgccccagggcggcaaggctggagtggcggccatcgatgcgtccactgtcaaaccgctgacattcaacaacggctcgtcctccatcaccatcccgcgaggcgaggtcgcctacacggacccgatcgactttaccgtctccccgcaggccaacatcgccgtctcgatctactcccaggcgggccagtcgggaagcagcatcacgggacacccgggcagccgcacgacgtcgtggatgcagtcgggcaaccacgtcgacgcagccagtctttccggctccaccacgaaacactggtacttcctctcggccgtggaagtctggtcgccaccgacgacgggcgcgtttgtgatcctgggcgatagcatcacggacgggcggggcagcaccgacgacggcaacgaccggtggccggacctgctcctggcgcgcatgcaggccgccgagggcggcggcaacctgagccaggtcgccgtcgacaaccaggcagcgggcggcaacgcggtgctgtccggggggctggggccgacgctgctctcgcggtaccggcgcgacgcgctgcaggtcgccggggtgcggtacgtcatgatcttcgagggagtcaacgacatcggcagcgggccggccgacgccgggtcgcaggccggcatcggcagccggctgcaggacgcgttcgcgcagatcacggccgactgcaaggccgccggcatcaagaccatcggggccaccatcacgccctttggcggcaatgggcagccgtactcgaaccccactagggagcagacgcgcgcccaggtaaacgagtggattctgaacagcgggacgttcgacgcgaccgtcgacttcgcctcgctggtggcgaacccggccatcgcgagccagctggcgccccagtatgacgggggcgatcatctgcatccgaacgtggcgggctacaaagcgatggcggacggatttcccttggacgtctttgaatga

SEQ ID NO: 470 - protein, 437 aa, Myceliophthora thermophilia
MSLARWAAVAASLLLLSPSTLAVPTHGNGKTTRDAVSPRADDDWHWVATWTSMPQLVEPNNMPPAPFTGGGAVFRDATLRQTVHLSIGAERLRLQIGNTFGGSDLPITAATIALPQGGKAGVAAIDASTVKPLTFNNGSSSITIPRGEVAYTDPIDFTVSPQANIAVSIYSQAGQSGSSITGHPGSRTTSWMQSGNHVDAASLSGSTTKHWYFLSAVEVWSPPTTGAFVILGDSITDGRGSTDDGNDRWPDLLLARMQAAEGGGNLSQVAVDNQAAGGNAVLSGGLGPTLLSRYRRDALQVAGVRYVMIFEGVNDIGSGPADAGSQAGIGSRLQDAFAQITADCKAAGIKTIGATITPFGGNGQPYSNPTREQTRAQVNEWILNSGTFDATVDFASLVANPAIASQLAPQYDGGDHLHPNVAGYKAMADGFPLDVFE

SEQ ID NO: 471 - DNA, 1602 bp, Myceliophthora thermophilia
  CDS (1)...(1602)
atgataaccaagcttgcacagctaggtacattcgacctagccatcagtaccaccgtcttggggctagctgccatcgtcttcttcgccctgggccgcatgctctggccatccaagaagggcacaccaccactcccgcccagtccaccctccgagcctctactgggtcattaccggattgttcctgatgatgccgccttcaagcggtacgccaagtgggcgaaagagtacaaaacagacgtcctctacttccacgcttttgggacaaaatggatcgtcctaaacagccttgaggcggcaactgagctgcttgaaaagcgaggagcgagttacgcggaccgtccccgcttcgtcatgtttgaggaaatgggttggtccccaaccctcacctggcttcgttggggcccgaaatatcagcttcatcggagggtgttgcaaccacctttcaccaaatcgaaggtcggaaactacatggcgatgcagaggagggaagcacactcttgctgtaaaggcatggttgacgaccctgaaaactggctgagagccgttagacggttctcggcggctatcgtgctcaagatcgcctacggactcgaggtggagggcccccaaagcccctggatccagatggctgaggacactgccgccgcggttggcaaatcgggggctccagctagttccatcatggaccgccttcccgcgactcgctacctgccagactggcttcccttcatggaacgattacgctatgctcgaacctggcggccggcaattgagaagcttacgcgcattcccttcgaggcgtcgttggagacaatgcgttcgggtgcgaacaacaactcctttgtccacactcagatgcaaatccggaatgacaatgccatcaaccaacaacccaatgaatttgatgtggaagacatcaaaggcgcagcagcaacaatcgtcattgccggcaatgacactacaacggctacgttgatgctttttgttctctacttgatgcaaaatcctgacgcccagcgcaaggcacaggaggaggtcgaccgtgttgtcggccacgacaggctgccagactgggacgacatgccgaaactacgatataccaaccttatcctgcaggagacctaccgaatgaacccgctctctccccttgggattccccacgccagcgttgcaggtgatgtctacaacggcatgttcattcccaaggggaccattgtatacccgaatgtttgggccatgaaccacgacgagtccgtctacgtcgaaccgttccgcttctggccggagaggtaccttccaaaggaccagggaggaaataatgagcccttcccagtaggaaattttgggttcggaagacgcatctgcgtcggcaggcacctagctgagaacagcctccttatcatgctggctacggtgcttgccactctcgaaattggctggcctctgggagaagacggcgaacccgccccttttgaacctgagtggtctttcaggggacaagccatcgtcttgcccttcccatcctccattcgaagccgaagtgccaagtccagtgcattgctagatgcagagctgcatgcgtcagaatatcaccgcggttga

SEQ ID NO: 472 - protein, 533 aa, Myceliophthora thermophilia
MITKLAQLGTFDLAISTTVLGLAAIVFFALGRMLWPSKKGTPPLPPSPPSEPLLGHYRIVPDDAAFKRYAKWAKEYKTDVLYFHAFGTKWIVLNSLEAATELLEKRGASYADRPRFVMFEEMGWSPTLTWLRWGPKYQLHRRVLQPPFTKSKVGNYMAMQRREAHSCCKGMVDDPENWLRAVRRFSAAIVLKIAYGLEVEGPQSPWIQMAEDTAAAVGKSGAPASSIMDRLPATRYLPDWLPFMERLRYARTWRPAIEKLTRIPFEASLETMRSGANNNSFVHTQMQIRNDNAINQQPNEFDVEDIKGAAATIVIAGNDTTTATLMLFVLYLMQNPDAQRKAQEEVDRVVGHDRLPDWDDMPKLRYTNLILQETYRMNPLSPLGIPHASVAGDVYNGMFIPKGTIVYPNVWAMNHDESVYVEPFRFWPERYLPKDQGGNNEPFPVGNFGFGRRICVGRHLAENSLLIMLATVLATLEIGWPLGEDGEPAPFEPEWSFRGQAIVLPFPSSIRSRSAKSSALLDAELHASEYHRG

SEQ ID NO: 473 - DNA, 957 bp, Myceliophthora thermophilia
  CDS (1)...(957)
atggttggtctcttagcgcccgcatccgctctccggcaggtctgctccggatgcgcccgccgagtccgcctgccgggcccggctttggctcggacgccggggaggatgctggcagcctcgtactcgcaagtctctacagtgcctctcgcatacgagctgcacgagccggccaagcccgtggctgataagcagacatcgcccatcattttcatgcacggtttgtttgggtccaagaagaacaaccggaccatgagtaaagtcttggcgcgcgacttagggcggcacgtttatacattggatctccgcaaccacggtgactcgccgcacgacccgaagcatgactacaccgtcatggccgccgacgtggccgagttcatccgcaagcacggtctgaaagagccgaccctcatcggccactcaatgggtgccaagacggccatggttctcgccctgaaccagccagacctcgtcgccaacctcgtcgccgtggacaacgcccccgtcgacgcccgcctctcgtccgagttcccccgctacatccaggggatgaggaagatcgacgaggccaagacgacgcgccaggccgaggccgacgagatcctcaagccctacgccccctcgccgacgatccgccagttcctgctcggcaacctgcaccggccctcgcccggcgacaggacgcaaaggttccgcctcccgctctccaccctcgcccgcgccctcgaccacctcggcgacttcccctacaaggacccggccgaggcccgcttcgtcaagcccgccctcttcgtccgcggcacccagagcaagtacgtgcccgacgacgtcatccccctcatcggccagttcttccccctgttcgagctcgtcgacgtcgacgccggccactgggtcatttcggagaagcccgaggctttcagggaggccgtgcttcggttcttggagcccaaagagtag

SEQ ID NO: 474 - protein, 318 aa, Myceliophthora thermophilia
MVGLLAPASALRQVCSGCARRVRLPGPALARTPGRMLAASYSQVSTVPLAYELHEPAKPVADKQTSPIIFMHGLFGSKKNNRTMSKVLARDLGRHVYTLDLRNHGDSPHDPKHDYTVMAADVAEFIRKHGLKEPTLIGHSMGAKTAMVLALNQPDLVANLVAVDNAPVDARLSSEFPRYIQGMRKIDEAKTTRQAEADEILKPYAPSPTIRQFLLGNLHRPSPGDRTQRFRLPLSTLARALDHLGDFPYKDPAEARFVKPALFVRGTQSKYVPDDVIPLIGQFFPLFELVDVDAGHWVISEKPEAFREAVLRFLEPKE

SEQ ID NO: 475 - DNA, 2013 bp, Myceliophthora thermophilia
  CDS (1)...(2013)
atgcggcgggcaccgaccccggcccgggaatcatcgtctctcgacattccgcatcctccttatctgttcccaacatcgctcagctccttaaggctgtccaaccaaccagagggcggtgtcagcaacctatacggcagctcgcaatgggatagacgcgaccccagaacgtcgtcagcccagtcgctggtaccctcggctgaggaaaccgagggccacatccgaaaacggaaactccttgttgtctacatccacggctttatgggcaacgactcttccttccgctcgttcccagcccatgtgcacaactttctaaagacccttctcggtgagactcatgtgatccataccaagatctacccccggtacaagacgtacaagtcgatcgacgtcgcctgcgagaactttagcaagtggttggcgccccatgaatcgcccacgaccgacgtggtcctggtgggccactctatgggcggcctgctggctgcagatgtagttctgctgccgagccagagcccatgggacgcatcaacccccttccgccaccgtatcctgggcaccgtttctctcgacgctccactacttggacttcacccgggcgttgtggtttccggcattgccagcctctttcggcccgcccaaagcccgccgttgatatgtgaggactcgcagagtgagcacgcagaggccagccaatctcagacaccctctactagaccctcttcctgttccgagatgctgccctcggacgaggcgtcttcaccccattttggctcatcgcctgctccccaggacccgtacttcaacccaccatttcccaatgacgttgcgttcgtggaccgcggatggttcaagaatatcatccactttgcagccaaacacaaggaggaaaacctagcgtatgccgccgccaatcacatcatgtctcaccttgaatttgccgcatgtctagccgactttgccgggctgaagtcaaggtacaacaggctcagggcactggaggatgtcgataactggaaccagcccggtgccgtgcgcgtccgcttcgctaattactacactgtctcgaccggaatgatcaaaaagtcgaggacgccctcgccgtgtggttcaccgaggagaccagatggatgcgaggtaaggcggccttcattgcgggacgccggctcgctagcctcggaccaacagatattatccgaagatgttgatgttaagcctccgagaatatcgatcgaggaatatagcgacggatctgggagcgatagccttcgagttctcgatcccatgccggagcctgaatccgggccagttcacgagcctgggagtaagtctcttgcgagctctgagatctccagaccgccctcccgacacgagaaagaaacacaagaaggagggaaagcctccgacgccaaagacgacaacctcctttcggtggaagacgagcccatcggcggagacacaacgttctcccctatccccgcggttccctccccaccagaagtgcctagtctagacgcccttcccgacaaggagtcccgcaagcgagctgaaaaggcctacaaagccgcgctaaaagcctacgcccaggccgttaagaagcgcgacagggccctcgaggtacgccagaaggcgctcgacaagcggcagcgcaaggccctcaaggaggccaagaagatggaaaaggaacaagcgaaactgcttcgcaagtcgccatccaccaaggacgaagagcagggggaaggaaccaaggtagaggaacggacgggcaaggagaaaccaccccgtcgcaggaaattttgcatgctcccgcccaagtcgtcagacggcaccgtcgacccgacctgggtggaggtgtacatggagggcgtcgacgaggtgggcgcgcactgcggcctcttcttgcccgggcgtcattacgagcccctagtgggggacgttggggagcggattgccgcttgggttcgggaggaagaatcgaggagagttgtggtggggcaggcaggttcggaggtctag

SEQ ID NO: 476 - protein, 670 aa, Myceliophthora thermophilia
MRRAPTPARESSSLDIPHPPYLFPTSLSSLRLSNQPEGGVSNLYGSSQWDRRDPRTSSAQSLVPSAEETEGHIRKRKLLVVYIHGFMGNDSSFRSFPAHVHNFLKTLLGETHVIHTKIYPRYKTYKSIDVACENFSKWLAPHESPTTDVVLVGHSMGGLLAADVVLLPSQSPWDASTPFRHRILGTVSLDAPLLGLHPGVVVSGIASLFRPAQSPPLICEDSQSEHAEASQSQTPSTRPSSCSEMLPSDEASSPHFGSSPAPQDPYFNPPFPNDVAFVDRGWFKNIIHFAAKHKEENLAYAAANHIMSHLEFAACLADFAGLKSRYNRLRALEDVDNWNQPGAVRVRFANYYTVSTGMIKKSRTPSPCGSPRRPDGCEVRRPSLRDAGSLASDQQILSEDVDVKPPRISIEEYSDGSGSDSLRVLDPMPEPESGPVHEPGSKSLASSEISRPPSRHEKETQEGGKASDAKDDNLLSVEDEPIGGDTTFSPIPAVPSPPEVPSLDALPDKESRKRAEKAYKAALKAYAQAVKKRDRALEVRQKALDKRQRKALKEAKKMEKEQAKLLRKSPSTKDEEQGEGTKVEERTGKEKPPRRRKFCMLPPKSSDGTVDPTWVEVYMEGVDEVGAHCGLFLPGRHYEPLVGDVGERIAAWVREEESRRVVVGQAGSEV

SEQ ID NO: 477 - DNA, 384 bp, Myceliophthora thermophilia
  CDS (1)...(384)
gcgttcgccgacttcgtcaccaggcagccgggggccgagtaccgcgtcacgcacgccgacgaccccgtcccgcggctgcccccgttgtgcctcaactacaggcacacgagccccgagtactggatcgacccggacgacaaggacgtcgtgtcgatcgacgaaatcagatactgccccggttactccaacaccgactgcaacggcgggaccgcgggcttagacacgtccgctcacggctggtacttccagaacctgagtggctgcgcccaagagatctcgttgttcgacggcttcgacgatccggaactcgagcgcaccctgagccggtacgccgaaatggacgtcaagttggcggccaacctgaacgcccagggacagccatag

SEQ ID NO: 478 - protein, 127 aa, Myceliophthora thermophilia
AFADFVTRQPGAEYRVTHADDPVPRLPPLCLNYRHTSPEYWIDPDDKDVVSIDEIRYCPGYSNTDCNGGTAGLDTSAHGWYFQNLSGCAQEISLFDGFDDPELERTLSRYAEMDVKLAANLNAQGQP

SEQ ID NO: 479 - DNA, 2582 bp, Myceliophthora thermophilia
  CDS (1)...(2580)
atgagaacgaaagcaactctccttaccggtctgctgtcgctcgcggcccagactggcagggccgatccgacatggcccgcagctaccgaccacatggaggagatcgtcttccagcttcaggggttcaaagggagcctgttcaacgacatcatcacgccctgcaacaacgaagctgccggtcctggacgcatcacggcgagcgaatggctgcgtgtgggattccatgacatggcaccgcacaaccgctactttggcacaggtggacttgacggctcgctgcaattcgagctgaacaatggcgagaacacgggccccggccaccgcactacgctcgagttccttgccaactacttgtcttccaggtcaagcctcgccgacctgatcgccgctggagtatacgcctcggttcgctcctgcggcggccccatagttcccctgagactgggccgcaaagatgccatcacggccggcagcgcgggtgttccgcagccccagaactcggtcgttactttcaggcagcagtttgaccggatgggattcacccccaccgagatgatccagctggtcgcctgcggccataccctcggcgctgttcacagcaccgagtttcctcagatcgtccccgccaacgtcggccaaattcccttcgatacgaccaacgccacgttcgacaacagggtggccaccgagtacgtgtccgggaacacccagaaccctcttgtcgttggcgcttccattggtgtcggccgtaattcggacttcaaggtttacaactcggaccagaacgtgaccatcaccaccctgaccgatcctgatgtcttccgcgacacctgccgggtcgtgctccagaaaatgatcgatgttgttcccgccggtgtcacccttaccgaccccatcgcgccgtatgccgtcaagccggtcgacatgcagctgaccctgaactcgggcggcaccaccttcctcttgacaggacacattcgagtccggaccacggagctgccggcgagctccatcaagaacgttgtcctcacctggaaggaccggaacggcgggaacgactgcggctcctccagcacttgctccacgacctccacgttgcagggcgtcgctaccggatttgacgacacctttggattcttcccgattgaggctaccattccggttgcgtccggtatctcgtccttcactctcgtcctgaacctcaatgacggttcgagcaggacatacgataacaatggcaactcgtaccccatgtctgatgccgttatcctgcagaagccacagagctgcctgctccaagggcccggggcactcactgtctctgctcttctccgcaacgacctcagcaacctcccagttaatctcgtggtctcgtatctaactcctcgcaacacccccgacgacaacccagttccggccctgaacgaagctaccgtgcagatgacgaagggcgactgcgttggcccgtacactttctattcaggcagtttcaccattcccggcgggcttagctacaatgccaggatcagcgtaaccgctggttcgaatgtcaccgcctacactgatgacttcaacaaggcgagcgatctcagcggtacttgcggcaccttcaccggtggcgccacctgttccgatgttacaccaccgagtacttcctccgtgacatcgtcgacttccacgtcctccagctctgctagcgttaccagcaccacgtccggttccagcagctcgaccgccagcacgaccgccagcactaccgcctccccgacccctgctgtcaagcctacggtcggtggttacgtttttgtcagttgctggaccgaaggaacgggcgtgcgggcgctcagcggggctactttcgcctacgatgagatgacactcgaatcctgcatggccaactgcaccggcttcgattactgggccaccgagtacggcagggaatgctactgtggcaatagcctccatcccagcagcagtgaggccccggttgaggagtgcaacatggtgtgtggcggtgatccgaccgaattttgcggcgccggaaaccgcctcgagctgtattcgaccaccgccacccgtaccacgtctgccactcccaccccgacgggcacgctggctgtcaagccgactgtgggcgactacacctttgtcggatgccagacggaggcggccaccggcagagctcttagcgggaaggaggtatacgctgacgactcgatgacgcttgagaagtgtgcgacgtactgcgccggcttcacttacttcggcaccgagtacggccgcgaatgcttctgcggtaacagcctcaacgccggcagcgttccggctcccgaggccgagtgcgacatggtgtgcgcaggtgacccgttcgagtactgcggcgccggaaaccgcctcgagctctaccgactctcgagcgtatcctccacggcgggcccgtcctcggaagccgccacgaccagcacaacaacaggccccgccacctcgaccacgattccctcgcgggccccgaccgtctctcccttcacccacgtcggctgctggaccgaaggcgctggcgtccgcgccctcactgccaagac

SEQ ID NO: 480 - protein, 860 aa, Myceliophthora thermophilia
MRTKATLLTGLLSLAAQTGRADPTWPAATDHMEEIVFQLQGFKGSLFNDIITPCNNEAAGPGRITASEWLRVGFHDMAPHNRYFGTGGLDGSLQFELNNGENTGPGHRTTLEFLANYLSSRSSLADLIAAGVYASVRSCGGPIVPLRLGRKDAITAGSAGVPQPQNSVVTFRQQFDRMGFTPTEMIQLVACGHTLGAVHSTEFPQIVPANVGQIPFDTTNATFDNRVATEYVSGNTQNPLVVGASIGVGRNSDFKVYNSDQNVTITTLTDPDVFRDTCRVVLQKMIDVVPAGVTLTDPIAPYAVKPVDMQLTLNSGGTTFLLTGHIRVRTTELPASSIKNVVLTWKDRNGGNDCGSSSTCSTTSTLQGVATGFDDTFGFFPIEATIPVASGISSFTLVLNLNDGSSRTYDNNGNSYPMSDAVILQKPQSCLLQGPGALTVSALLRNDLSNLPVNLVVSYLTPRNTPDDNPVPALNEATVQMTKGDCVGPYTFYSGSFTIPGGLSYNARISVTAGSNVTAYTDDFNKASDLSGTCGTFTGGATCSDVTPPSTSSVTSSTSTSSSSASVTSTTSGSSSSTASTTASTTASPTPAVKPTVGGYVFVSCWTEGTGVRALSGATFAYDEMTLESCMANCTGFDYWATEYGRECYCGNSLHPSSSEAPVEECNMVCGGDPTEFCGAGNRLELYSTTATRTTSATPTPTGTLAVKPTVGDYTFVGCQTEAATGRALSGKEVYADDSMTLEKCATYCAGFTYFGTEYGRECFCGNSLNAGSVPAPEAECDMVCAGDPFEYCGAGNRLELYRLSSVSSTAGPSSEAATTSTTTGPATSTTIPSRAPTVSPFTHVGCWTEGAGVRALTAK

SEQ ID NO: 481 - DNA, 3387 bp, Myceliophthora thermophilia
  CDS (1)...(3387)
atgaccgtctctgtcgacctgaaccgcccgttaccccataccatctcagccatggcgcccgagtcttttcagacgcggcgggcgcgtcccacccgggtcaagaccgacctggcaacccagacccagctggttgccatgccaccttcagccatcagcatatcctccgcatcgcccgcctcgcaacacggctcgcccgcccagtcggtcgagactatcgggacgggcatgactactggcagctctatacaagcttctcccgaggtagcagaggggtgcctcgacaaggagattgacgatctcgatcagctggtcacgcctttccaactccccgagtccatcagcgtcaagcagcagtccgagccagccactgcttacatgtccaggaggacaagcactgcctcgctcagccaacccagcttcaggagttccggcacgacggctatgggcgaagccgtgaagatgagcattgtccggcgagcctcgaatacggttcgcaaggctgctggcttgatgaacaggcggccatcgtcaactcacccgaggagccgggatgggagtgtcggacccagcgtgattcgccggagaggaagcatgagcaatccgacgacgccctacgagaacattagcacctttgatagcgactcggagaacgaggttgcgtttgcagccgaagatcgcgcgggggatgacgcgaccctcccggaaacgggttccatcctctcgtcgacttcgtccgatggcttcggcctgatcccgctgtccctccgtcaaggcatgaccctgaccaaggtctccaagaagaagagcacgaagaggatcaccttgtatctcgatcccgataccgctaagatctggtgggacaggaacaaatacatctacattgacgacatcaaagagatccgcacggccgaagacatccgccagtatcgcctcgatgcagcgctcccggaaagcgtagaatcccgattcttctcgctcatctacacgcttcccggaaaatctaacacgaagctcctgcacctcatcgccgatagcgacgaatcgttccagcagtgggtcgaggctctcgagaccatctctaagcatcggcaagactttgccacgagcttgatgtcgttcaacgacaaggccgtccgcgcgtactgggggatggagatggagagacagctgggaaaggtgcggtcggccgaggacgagcatatcgattttgccggagttgagcgcgtgtgccgcagcctgcacatccacgtctcaactgaggagctccgcagaaagtttgacatggccaaaggcaggcgggacagctctgatgatctgccgtcgagcgccaagcacagctcccgactcaactttgacgagttcctcgagtttgtacgcctcatgaagacgcgcagtgacatccgagccgtctaccaggcccacgcgagcgagcccgccggcgggatgacgagggacgagttcttccaatttctgcgcgaggtgcagcgcgaggatgttgacgaggacttggcccattgggagtccgtctttgcgcggttcgcccgcaagggcaggccgagggacgccgaaaagcaggggatcttgggcgaggaaggcctgaccatgtccgaaaccgcatttgctggcttccttacgtccacctcaaacgagccaattcccaaagaacctcaggactacgtgctagaccggcccatgaacgagtattacatttcgagctcgcacaacacgtacctgataggccgccaggtcgccagcatctccagccacgagggctacatctcggctctgatgcggggctgccgctgtgtcgaggtcgactgctgggacggcgaggggaaccagcccgtcgtgacgcacggtcacacgctgacgacgagcatctcgttcctcgaagtcatcaagactatcaacaagtacgcattcgtgaaatcgcgctttcccttgtggatttcgctcgaggtgcgctgcaatcccatcactcagatcaacatggccaagatcatgatcgacgtcttcggcgacaagcttgtgcgcgcgcccctagacccgacttcggaccgcctgccgtcaccgtcggagctgatggagcggattctgatcaaggtgaagaagccggacgagtccatgaggggcgccgaccgacccaccgggcgccgccgtggcaacagcatgccgtcgccgtatcagcgagcgcttgcgctggacagcatgcccgttccgactccctcgagtcccctcctcagcccgtctccaacctcgatgtccaacaggcagattaacaccattgccgagggcctggtccacgagccggtcagcagtagccctagcgagtgcgacagcgaaggtgaagcgggagcggccaagaaggccaacagcaaaattcatcccatcctcggggagctgggcgtgtactgcatggggatccattttgacggttttgacagccccgacgccaaaaagttcaaccacatcttctcgttcaaggagaagacgtttgctgagaagaaccagccgggcgaggcgaagagggcgttgtaccgccacaacatgcgctacctgatgcgggtctaccccaatggtggccgtatttcgtcgagcaactttgatcccctcatctattggaagcgcggagtccagatggccgccctcaactggcagacctttgacacgggcatgcagctgaaccaggccatgttcgacggcggcacggctcattcgggctacgtcctcaagccacttgaggggcggcagatccaggtgatgccaaacctggctcccgacgagtgcgtgggcaagcgcccgcggaagaaggttgccttcgagatcgaggtcatctccgcgcagcagctgatgcggccccataacctgggcgagaagcgcacgctagatccctatatcgaagtcgaggtgctaatggcggacgacaagcggaacaaggcggatgcggctgcctatgccgcggctcaacagacgcagctcaagcagcgcaccaatatcgtacgcgacaatggctttaaccccgagttcaaccagacgtgtactttcgacgtcaccaccaagtacccggacctgatcttcgtgcgattcagcgtcaagcttgctgacaggggcggatacaatgacaaggcgcccttcgccacctacaccgttaagctcagcaacctcaagcagggctaccgcacgatcccgctgtacaaccacaagggagagcgctttttgttttcgacgctcttctgcaggatcaagaaaggcccggtcacggatattatggtgtcgtaccaggaagatgcacccaggaatggcggcaacaaactgaaaaacatcggcaggaacgtcttcgccaacacgagccctaaatcgagcatggacagcagccggaccacatga

SEQ ID NO: 482 - protein, 1128 aa, Myceliophthora thermophilia
MTVSVDLNRPLPHTISAMAPESFQTRRARPTRVKTDLATQTQLVAMPPSAISISSASPASQHGSPAQSVETIGTGMTTGSSIQASPEVAEGCLDKEIDDLDQLVTPFQLPESISVKQQSEPATAYMSRRTSTASLSQPSFRSSGTTAMGEAVKMSIVRRASNTVRKAAGLMNRRPSSTHPRSRDGSVGPSVIRRRGSMSNPTTPYENISTFDSDSENEVAFAAEDRAGDDATLPETGSILSSTSSDGFGLIPLSLRQGMTLTKVSKKKSTKRITLYLDPDTAKIWWDRNKYIYIDDIKEIRTAEDIRQYRLDAALPESVESRFFSLIYTLPGKSNTKLLHLIADSDESFQQWVEALETISKHRQDFATSLMSFNDKAVRAYWGMEMERQLGKVRSAEDEHIDFAGVERVCRSLHIHVSTEELRRKFDMAKGRRDSSDDLPSSAKHSSRLNFDEFLEFVRLMKTRSDIRAVYQAHASEPAGGMTRDEFFQFLREVQREDVDEDLAHWESVFARFARKGRPRDAEKQGILGEEGLTMSETAFAGFLTSTSNEPIPKEPQDYVLDRPMNEYYISSSHNTYLIGRQVASISSHEGYISALMRGCRCVEVDCWDGEGNQPVVTHGHTLTTSISFLEVIKTINKYAFVKSRFPLWISLEVRCNPITQINMAKIMIDVFGDKLVRAPLDPTSDRLPSPSELMERILIKVKKPDESMRGADRPTGRRRGNSMPSPYQRALALDSMPVPTPSSPLLSPSPTSMSNRQINTIAEGLVHEPVSSSPSECDSEGEAGAAKKANSKIHPILGELGVYCMGIHFDGFDSPDAKKFNHIFSFKEKTFAEKNQPGEAKRALYRHNMRYLMRVYPNGGRISSSNFDPLIYWKRGVQMAALNWQTFDTGMQLNQAMFDGGTAHSGYVLKPLEGRQIQVMPNLAPDECVGKRPRKKVAFEIEVISAQQLMRPHNLGEKRTLDPYIEVEVLMADDKRNKADAAAYAAAQQTQLKQRTNIVRDNGFNPEFNQTCTFDVTTKYPDLIFVRFSVKLADRGGYNDKAPFATYTVKLSNLKQGYRTIPLYNHKGERFLFSTLFCRIKKGPVTDIMVSYQEDAPRNGGNKLKNIGRNVFANTSPKSSMDSSRTT

SEQ ID NO: 483 - DNA, 399 bp, Myceliophthora thermophilia
  CDS (1)...(399)
atgccgccaacacgcatccccaccaaggaggactttgcctccatcctcccgtcgcaccccacctaccaaggtcgacgacaacaacaacagcaacagcagcaacagcaacaacaacaaggaaaaggaggaggccaaccagacgacgaccccatctcgctggtctaccccaacccgcccgagtccaccacctcgatcctgctcctcttccacggcctgggcgacaccgaggccgcctttgccgccttcgcccgcaacctggccctcccgggggtgctggccatcgccgtctgcgggaccgccttgctcccgccctccctcctccatgcggacgaccacgacgacccgcgcccggggggtggccacgggcgggcgcgggttaatcgtccctcttatcagtga

SEQ ID NO: 484 - protein, 132 aa, Myceliophthora thermophilia
MPPTRIPTKEDFASILPSHPTYQGRRQQQQQQQQQQQQQGKGGGQPDDDPISLVYPNPPESTTSILLLFHGLGDTEAAFAAFARNLALPGVLAIAVCGTALLPPSLLHADDHDDPRPGGGHGRARVNRPSYQ

SEQ ID NO: 485 - DNA, 426 bp, Myceliophthora thermophilia
  CDS (1)...(426)
atgctgttagagttaggccagggcgcatcgttcgccctggggctggccagcgccctccgcgccggggaccgcgtcgtggaggtcgtcgccaccacgacgggtgccgcggccgccgccgggcagggcaacggatacggaaatggaatggcgttcaagggggtcgtcgccatcggcggggcgctgcccgtgtccatggtgccgaccgtcggcgggctgggcaagtccaagactcccgtgctggtctgccgcggccgcgagagcgaggcggtcgacgaggacgccgtggagctgctcgagagggagtttgaggacgtcaaggtcgtccggtggaagaggaccgacgacgggatgccgcgcaaccgcgacgaggccctgcccatgatgcgcttctttgccgagaggttgaggaacgtgtggcagcgttag

SEQ ID NO: 486 - protein, 141 aa, Myceliophthora thermophilia
MLLELGQGASFALGLASALRAGDRVVEVVATTTGAAAAAGQGNGYGNGMAFKGVVAIGGALPVSMVPTVGGLGKSKTPVLVCRGRESEAVDEDAVELLEREFEDVKVVRWKRTDDGMPRNRDEALPMMRFFAERLRNVWQR

SEQ ID NO: 487 - DNA, 1257 bp, Myceliophthora thermophilia
  CDS (1)...(1257)
atgagtgatcaggcgagcgccggagagggcatccaccttattgtcattggcgccggactcgcggggctgagcgccgccctgtcgaccaagctggccaacccggcgcaccgggtgacggtgttggaggcggccaaggagctgcaggagattggcgccggcctgcaaatcacccccaacggcacccgcctgctcgcagcctggtcgctcttcccgcggctcgccccgcgcgccgccgagccgcgctcactctcggtgcggcgctacgacggcacccggctgctcgcgcacgagcccgcgctgcaggacagcgttcgcgcccgctacggcggctaccccttctgggacctgcaccgcgtcgacctgcagcaggccatggtcgcgcgctgcgccgagctcggcgtcgagatccgcctgggctcgcccgcggtgcgggtcgactttgccgaggctcgggtccacgtcctcggcgacaacggcggcgacaacggcggcgccggagccgtcgtcgagggggacgtccgcatcaccatcctggccgacgagctggagggtgaggacgcggaggagctgcgggccttcatccgggacgcggcggtcaacttctggatcggcccccggtcgcactgcgtcggctactcggtcagcgccggcgaggtctacaacctcgtcctgctgtgcccggacgacctgcccggcggcgtggtcaagcgggaaggggacaaggacgagatgcgggcccggttctccggctgggacccgctgctgggcaggctcctgaagcaggtccggggtgtggtgcacaaatggaggctgatgtggctcgacgcgctgcccgagtgggccaacgaggagggcaccttcttcatggccggcgactgctgccacccgatgctgccctatctggcgcagggggccaactcgagcctggaggacggtgccgtgttcgggtcgctgctggggagggtcaagaagagcgagatggcgaggcagctgccccgcgtctcggccctgtatcagaggctgaggatcgagaggagccgcaagatccagatcgagaccttcaagcagagggacgactcccacatggaggacggagaggctcaggagaggagggatgccctgatgctgagcatgctgggcaaggaggtcaaggcacccttcccgagcaggtggacgtgtccggagattcaggcgttcctgtacggatacgacgcatacgccgaggcggagaaggcttatcaggaaaatcccttctga

SEQ ID NO: 488 - protein, 418 aa, Myceliophthora thermophilia
MSDQASAGEGIHLIVIGAGLAGLSAALSTKLANPAHRVTVLEAAKELQEIGAGLQITPNGTRLLAAWSLFPRLAPRAAEPRSLSVRRYDGTRLLAHEPALQDSVRARYGGYPFWDLHRVDLQQAMVARCAELGVEIRLGSPAVRVDFAEARVHVLGDNGGDNGGAGAVVEGDVRITILADELEGEDAEELRAFIRDAAVNFWIGPRSHCVGYSVSAGEVYNLVLLCPDDLPGGVVKREGDKDEMRARFSGWDPLLGRLLKQVRGVVHKWRLMWLDALPEWANEEGTFFMAGDCCHPMLPYLAQGANSSLEDGAVFGSLLGRVKKSEMARQLPRVSALYQRLRIERSRKIQIETFKQRDDSHMEDGEAQERRDALMLSMLGKEVKAPFPSRWTCPEIQAFLYGYDAYAEAEKAYQENPF

SEQ ID NO: 489 - DNA, 666 bp, Myceliophthora thermophilia
  CDS (1)...(666)
acggcgcggtcggcgcggcgggtgcgcctgcacgagcgcgggctgggcggcgtgcccacgggcgccttccgcggcgtcgaccttttcatccgcgaggtccgcggcgccgtcgaggacgcctacgtcgacgccgccgccgccgcccgggaggagtacctcctcgtcaaccagcctcctcctcctcctccccccgcccccgcccccgatcgtcgcgatgagcagcccgatgttgagaagactgatgatgatgatgatgggcacggtcgggatgaggagcagaagaaggaaggagaagaaagaggagaagaggaggaggaagaagaaggaggaggaggaggaggaggaggagaagattccggaaagaagaagtgcgcggcgctcgagacggagcggtcgctcgcccaggacatcgcccgcggcgaaagcggcggcgaaagcggcagcggcagcggcagcggcagcagccccttccccacgctggcgctggccgcgtaccagttcgcggccattgacgcgctcgatcagctgggatggcgcaagtatcccgtgtggatccacaagcacaaccatagtcatgcggccatgattgtgcgcatggagaagcccgggttcgaggagggcaggctggtgttgaagcactgggtcacggaggagtttctggtctga

SEQ ID NO: 490 - protein, 221 aa, Myceliophthora thermophilia
TARSARRVRLHERGLGGVPTGAFRGVDLFIREVRGAVEDAYVDAAAAAREEYLLVNQPPPPPPPAPAPDRRDEQPDVEKTDDDDDGHGRDEEQKKEGEERGEEEEEEEGGGGGGGGEDSGKKKCAALETERSLAQDIARGESGGESGSGSGSGSSPFPTLALAAYQFAAIDALDQLGWRKYPVWIHKHNHSHAAMIVRMEKPGFEEGRLVLKHWVTEEFLV

SEQ ID NO: 491 - DNA, 6828 bp, Myceliophthora thermophilia
  CDS (1)...(6828)
atggagcccgttatcgacgagcgctgggccgagaggccggcgttcctcctgtttggagatcagtcgctcaactgccacaccttcctggctcacttcttccgcaagcccgccatggaccagggccacctggcgaaggccttcttgcttcaggcctttcatcatctgaagaaactcatcgacaagatgcccccggccgagagagcaatgttgcccgaatttaggacactgcagcaactcaatgagcgataccacagtgccacgctgaagcacgcaggcatcgacgcagctttgctggcaatggctcagatcgtgcactatatcaatcactctgaaaaacactgcgaggacatcacacagcctcaccagacctttctcattggactttgctccgggctttgggcgtcatccgctatatcggtgtcaccgtcgttgccggacctcgtccatgtaggggttcaatttgtcctattcgctttcaagacgggcacatacgtccactcggtttcgcaacagttgagcccggcattcgaccggtcggagtgctggacgtacgtcttctccgggctggagcaggacgatgtcgtagccaggctagatgccttcaaccgcgtgtgtaacatcccgcccgcttgtcgcgcatacgtgagtgcggtatccgagtacaacattgcaatatccggaccgcccagcactctagacacgctggtcaagaacgagatcttgccagcggaaccggtctccatccccgtccatggtccctaccacgcgccgcacctgcacgccgaggtagacgtcaaggctttgctagacctggataagccagagacgcgggacgcactgtacatgacaagtcctcggtcacccatcatgaactgcggcgccggaacgtggtttaccgagacggacacgctgtcgctcgtggccgcggttgccactaccatcctgaaagagacattggactttaccaaggtgcttaagggctgtgtcgaagctgctcgcgaatttaaattcgaagacaggagatgtctcatcctccccctcggtccgactcagaacgcgggaacgctgaagaaactcctcgaagaggaagcaaagttgaaggtgaagactcgcatgccgccgccctactcaccagagagtacggcatccacggtaggaaaccagggcttgattgggagacccaaacttgccatcgtcggcatggccggccgcttccccgatgcccccagccacgaggcgctttggcgattgctggaacagggtctcgacgtgcaccgtgaggtcccccccgatcgcttcgatgtgaagacgcacttcgacccgaccggccagaaggacaacacgagccacaccccgtacggttgttggattccggagccgggcctcttcgacccccggttcttcagcatgtcgcctcgcgaggccgcccagaccgacccgatgcagcggatggcgctgacgaccgcatacgaggcactggagatgtcaggctacgtccccaacaggaccccctcaacgaggcttgaccggatcggaacgttttatggccagacgtccgacgactggcgcgaaatcaatgcggcacagacgattgacacgtatttcatcacgggcggcgttcgcgcctttgggcctggccggatcaattaccatttcggattcagcggacccagtctcaatatcgataccgcttgctcttccagcgcggcagcgatgcaggtggcttgcacggctctctgggccggggactgtgacacggccgttgttggcggcctgtcgtgcatgacgaacccggacatcttttccggactcagtcgaggccagttcctctccaagaacgggccgtgttccaccttcgacaataaggctgatggctactgccgtgccgatggctgcgcctctgtcgtcgtcaagcgtttagatgatgcattggccgacaacgaccggattcttggtgtcatcctcggcaccgccacgaatcactcggcagacgccatctccatcactcacccgcatggcccaacgcaggccatcttgtcaaccactgttctagacgaggctggcgtcgatcctcatgatgtcgactacgtcgagatgcacggaaccggtacgcaggcaggggatggcaccgagatgcggtcagtcaccgatgtctttgcccctgcagaccgcccaaggccccacgacaggccgctgttcttgggttcggtcaaggcaaacgtcggacacggagaggccgcctccggcgttaccgcgctcatcaaggtcctcttgatgctcgaaaagaacctcattccgcgtcacgttggtatcaagccaaacagcatcattaaccagaccttccccaaggatctctcggaacgaggcgtcaacatcgcattccacacgacgcccttcaagaggagagacggcaagccgaggcgcgtcttcgtcaacaacttcagcgctgcgggtggtaacaccgggattctggtagaagaccctccgaagcctccgccggctaagcctgatcctcgcagtcaccacatcgtcacgttgaccgggaaggccagggcttccttgctgatgaacgccgagcggctcctgcgctggatggaacagcacccggaaacgcctgtctcgcacatatcatacagcacgacggcgagaaagatgcagcattattggcgaataagcgtgacaggttccgagattggagacatccagaaggcaattcagaacgcccttggcgagggcaacttttcgcctgtcaaagccgagcagcctaaagtcgtcctgatgttcactggtcaaggcacgttctatgccgcgctgggcaaggaattttatcggaaccactcggtgttccgcaggagcattgacggctttgttaagttggctcgcatgcagaacttttcatctttccttgggctcatcgacggcagcgagccagacgtgtctcggctgtcggcggttgagctgcagcttggtttggtatgcttccagatggcgctcgcccgactgtggatgtcgtgggggatcaatcccgccgccgtcgtgggccatagccttggagaatatgccgctctcgagatcgccggcgtgctctccgccagcgatgtcatctacctcgtcggttctcgtgcgcaactgctcgaaaaggcatgcgaacccggcacccacggcatgctcgccgtcacgggtgcacacgacgccatcatggaggccatgggtcggcgggcccttgggctcaatgtggcctgcatcaacgggccccgtgagactgtccttagcggtccggttgccaagacgttggaggttgcgtcgttcctgtcccctcgcggcttcaggagcactccgttgaaagtagcctatgctttccactccccacaggtggaggtcatcatggatgactttgagaaactcgcgcaaggagtcacgtataatgttcccaaagtccccgtcatctcgacggcccgtggaaaggtgattgtggccgacgaatttgacgccaggtatctccgcgagcattcacgcaacaccgtcgatatgctcggcgggctcgttgatgctcagaggaacggcactattgatgccgaaactgtctggctcgagatcggcgctcaccccgttcttacgaccatggtcagggctacctttggcaccactacggtggcagtccctaccctgcgccgtgatgaaccgtgctacaagacggtgacggagagcatttccacgcttcatagccagggtgtcgacttagacttcaacgagtatcaccgcgaattttccgactctgtgcgcctcctggatttgcccagctacgctttcgacgaacgtaactactggatccaatacacgggcgattggtgcctgatcaagcacagaacagcggcggccagcgagtcggagtcgaagcctcgatggccgaccatttccacgacttcggtacagaaagtcgtcaaggtagaagtcgacggcgacgtggccacggtggaaattgagtccgacctccaccaggagcagctccggaatgccgtatctggccatcgggtcaacggggccccgctgtgcccatcatctctctatggcgatatggccatgaccgtgtgcgactatgcctacaagctgctgcgtcccgagagtcgagacatcggctgtaacgtctcaaacatggaggtccccaagacgctcattcttgatgaaacagctaaaagtcacatcctccgcctgacggtgacggccaatgcaaaactcggcttcgccgacttgacctggcacacgggcgacggcaagaggaagatcaaccatgcccactgcaaagtgtactacggcaaccgtgatgactggcagagcgagtttgacagagccgcctatctcgtcaagtcccgaattgacttccttcaggaggctgagaagagggggaaagcgtcaaaggttggccgtggcctggcctacaagctcttctccgccttggtcgactacgccccgcgttatcggggcatggaggaggttacccttgacagtgccacttgcgaggcgactgccaggattcgcttccagacaacggagcaggatggtaccttctacttcagtccctaccacattgacagcgtctgtcacatctctggtttcatcatcaacggcaccgacgccgtggattcccgcgaacaggtctttatttcccacggctggggctccatgaggttcaccgagattccggacgccaacaaggagtatcgcagctatatccgcatgcagaagatgaaggatagcaagatgatggccggcgacgcctatgtcttcgacggcgacaagatcatcggcatgacgggcgacatcaagttccaatgcattccgcgccatgtcctcaacacggtgcttcccccacgaggcgcacaagcggttcggacccctgctgctgctgctgctgctgctgctgctgcccgaccgcccaccacgaccgccgcgccaagcaagcagacaagcaaggaaccaagcaagtcaccaaccaagccgccaaacaagtctgcggccaccaagacgaagaagaaggagaagactgtgacaccctctaacatacgtacggtggaccagaatctgaagagcgtggtcacggcagtcatggacatccttgtccgggagttgggctgcagccctgacgagcttgctgacaacgtttccttcaatgatctcggcgttgattccctaatgggcttgacggttactggcaagttccgtgaagagttgtctttggacgatattgactcggacgtcttccttgaacacaccactattggcgcgttcaagcagtacctggcgagattcgagtctcggccgggtcgccaggaaagcgtgccgtctcgaggctcagaagtgtcgccggacgacgagtcccctgagcttgactcagattcggacgtaacgacgccgcccgacgacagcgaaacccattcatccaaggccggcgaaccggccgaagccccttcagctgacgagggtgcaaaactgcgggacacacttcgccgggccattgccgaggaagcaaaggttgaagtcgaagaagtccttgccgtgcgggatctgcccagtcttggcgtcgattctatcatgggtctggctatcgttggccgtgttctcgaggagattggtgtcgctctggagaaagacctcttcctcacgaacacaacgctcaaagagatagaacgcgccctcggtattgaggacttgcccaagaagtcttccaaagccaaacaggaaccgaagcaacaacaacacgaacaggcaccacccaggaaggaagccaggcaggagcccaagcaagaatccaagaaggaaacgaaagaggaacccaagcaggagcctaagaaggaaaacaagaagggacctgaagaggagtccaagcaagccgagaagtctcggagacagaccgaggaatcttcaaaaacgggccctcctgtcaagcagcatccgaggattggtttggaggaacccgcccctccaaaacctcctaggcccacagaaatcatggacgattatccacaacgcacggccagatctgtccttctgtctgggacatcaaagtgttccaagcagctgttcatgattccggacggcagcggctccgccacatcgtacacggagattgccaaggttgggggtgattggcgtgtctggggcctcttctctcccttcatgaagacacccgaggagtatgtctgcggagtgtacggcatggcggcaaaattcatcaccgagatgaaacgtcgccagccctccggcccatattctgttgcggggtggagcgccggcggcgtcattgcgtatgagatggtgtatcaattaaccacgtccggcgaggaggtagagaaccttattctcatcgatgcccccgccccggtcactatcgaaccgcttcctcaaggccttcacgcatggttcgcttcgatcggactgcttggcgaagattctgggaaagatgggggtgagaagaaggtaccggagtggcttcttccccattttgccgcctccatcacggccctgagcaattactatgccgatcccatcccgaaggacaggagccccaagaccatggccatctggtgtgaggacggcgtgtgccacctgcccacggacccccgaccggagccgtatccgaagggccacgccctctttcttctggataaccgcaccgactttggaccgaaccgatgggacgagtatctggacgtgaacaagttgaagctcagacacatgcctgggaatcatttcaccatgattcacggggagctggccaagcaactggaaggcttcatcagggaggcccttatagacgaaagctgcgactga

SEQ ID NO: 492 - protein, 2275 aa, Myceliophthora thermophilia
MEPVIDERWAERPAFLLFGDQSLNCHTFLAHFFRKPAMDQGHLAKAFLLQAFHHLKKLIDKMPPAERAMLPEFRTLQQLNERYHSATLKHAGIDAALLAMAQIVHYINHSEKHCEDITQPHQTFLIGLCSGLWASSAISVSPSLPDLVHVGVQFVLFAFKTGTYVHSVSQQLSPAFDRSECWTYVFSGLEQDDVVARLDAFNRVCNIPPACRAYVSAVSEYNIAISGPPSTLDTLVKNEILPAEPVSIPVHGPYHAPHLHAEVDVKALLDLDKPETRDALYMTSPRSPIMNCGAGTWFTETDTLSLVAAVATTILKETLDFTKVLKGCVEAAREFKFEDRRCLILPLGPTQNAGTLKKLLEEEAKLKVKTRMPPPYSPESTASTVGNQGLIGRPKLAIVGMAGRFPDAPSHEALWRLLEQGLDVHREVPPDRFDVKTHFDPTGQKDNTSHTPYGCWIPEPGLFDPRFFSMSPREAAQTDPMQRMALTTAYEALEMSGYVPNRTPSTRLDRIGTFYGQTSDDWREINAAQTIDTYFITGGVRAFGPGRINYHFGFSGPSLNIDTACSSSAAAMQVACTALWAGDCDTAVVGGLSCMTNPDIFSGLSRGQFLSKNGPCSTFDNKADGYCRADGCASVVVKRLDDALADNDRILGVILGTATNHSADAISITHPHGPTQAILSTTVLDEAGVDPHDVDYVEMHGTGTQAGDGTEMRSVTDVFAPADRPRPHDRPLFLGSVKANVGHGEAASGVTALIKVLLMLEKNLIPRHVGIKPNSIINQTFPKDLSERGVNIAFHTTPFKRRDGKPRRVFVNNFSAAGGNTGILVEDPPKPPPAKPDPRSHHIVTLTGKARASLLMNAERLLRWMEQHPETPVSHISYSTTARKMQHYWRISVTGSEIGDIQKAIQNALGEGNFSPVKAEQPKVVLMFTGQGTFYAALGKEFYRNHSVFRRSIDGFVKLARMQNFSSFLGLIDGSEPDVSRLSAVELQLGLVCFQMALARLWMSWGINPAAVVGHSLGEYAALEIAGVLSASDVIYLVGSRAQLLEKACEPGTHGMLAVTGAHDAIMEAMGRRALGLNVACINGPRETVLSGPVAKTLEVASFLSPRGFRSTPLKVAYAFHSPQVEVIMDDFEKLAQGVTYNVPKVPVISTARGKVIVADEFDARYLREHSRNTVDMLGGLVDAQRNGTIDAETVWLEIGAHPVLTTMVRATFGTTTVAVPTLRRDEPCYKTVTESISTLHSQGVDLDFNEYHREFSDSVRLLDLPSYAFDERNYWIQYTGDWCLIKHRTAAASESESKPRWPTISTTSVQKVVKVEVDGDVATVEIESDLHQEQLRNAVSGHRVNGAPLCPSSLYGDMAMTVCDYAYKLLRPESRDIGCNVSNMEVPKTLILDETAKSHILRLTVTANAKLGFADLTWHTGDGKRKINHAHCKVYYGNRDDWQSEFDRAAYLVKSRIDFLQEAEKRGKASKVGRGLAYKLFSALVDYAPRYRGMEEVTLDSATCEATARIRFQTTEQDGTFYFSPYHIDSVCHISGFIINGTDAVDSREQVFISHGWGSMRFTEIPDANKEYRSYIRMQKMKDSKMMAGDAYVFDGDKIIGMTGDIKFQCIPRHVLNTVLPPRGAQAVRTPAAAAAAAAAARPPTTTAAPSKQTSKEPSKSPTKPPNKSAATKTKKKEKTVTPSNIRTVDQNLKSVVTAVMDILVRELGCSPDELADNVSFNDLGVDSLMGLTVTGKFREELSLDDIDSDVFLEHTTIGAFKQYLARFESRPGRQESVPSRGSEVSPDDESPELDSDSDVTTPPDDSETHSSKAGEPAEAPSADEGAKLRDTLRRAIAEEAKVEVEEVLAVRDLPSLGVDSIMGLAIVGRVLEEIGVALEKDLFLTNTTLKEIERALGIEDLPKKSSKAKQEPKQQQHEQAPPRKEARQEPKQESKKETKEEPKQEPKKENKKGPEEESKQAEKSRRQTEESSKTGPPVKQHPRIGLEEPAPPKPPRPTEIMDDYPQRTARSVLLSGTSKCSKQLFMIPDGSGSATSYTEIAKVGGDWRVWGLFSPFMKTPEEYVCGVYGMAAKFITEMKRRQPSGPYSVAGWSAGGVIAYEMVYQLTTSGEEVENLILIDAPAPVTIEPLPQGLHAWFASIGLLGEDSGKDGGEKKVPEWLLPHFAASITALSNYYADPIPKDRSPKTMAIWCEDGVCHLPTDPRPEPYPKGHALFLLDNRTDFGPNRWDEYLDVNKLKLRHMPGNHFTMIHGELAKQLEGFIREALIDESCD

SEQ ID NO: 493 - DNA, 3864 bp, Myceliophthora thermophilia
  CDS (1)...(3864)
atggagagtggcttggaagacctgatgcaacaaatgggaaacgacctcgcagccgcagacggttcgtacccagactatcttccgtggagcgactttcaagacgagctagacagatacccgagcactgttcagctcaccagacaggacacgtccctgtgcgccattcccaattttgccaatatcccgtctccttcagaactggtagtggcgtcgtccaggacttccatcaacaccccagagactagcgtaatgtcacttgaatacgcagcggtgccgggcaccagggattttgctacggcagttcactcagacagcgcggtacccgagtttgaagcagtcgtccttgccgaagctgagtggaatctggcgcgttgcaacccaccaccaccgcctggacattgcccgaaaacggcggttgttcacctccgaatcctagagcaaaagtcaaaacaggaagacacgtggagcgctttggaagagtatctggagaaggtcgagggggacgcgtctgacttggcgccggtagtgcctataagttcctgcacccgggacaagttgctcgccatcacccagagcttcttgcataaagctctagaaatccaccggagggggcataatagctgcaggaagagcgggtattgcagccccggagactgcaacttcatagtcctacccccgccgaagatcctcgagtacttcttacggagctatctacgcagccttacagtttactaccccctggtaactgctggctgtgtagatccaaacgagatgctacaagacaaccaggcatcgacgcttctggtgctgctcatgattgcccagggagctgcagctatgccacttcaggaagctcgttatctctccgcgggcctgacggaaacttgccgcatatccctctttgacattgttgagaaggatatgggactgtcggcagatcccactacccttcgctgtgcgctcttatttcttgtccttggcgcttggagcggggacaaatggctcatggacatcgccatgggccagcggggcatgtatatgtcgatgctcaagcatgctggaatgctgggatcacagactgcgaagaattcgaagttcgatgacaatgcaataaattccgaggtccaatggcgcgcctgggttgagcgtgagactcggcacagactggtttacaactacgtcatgctggaccaggagctcagccttttccatgacaccgcgcctctgtttgcgatcacggagcttcaatgccccctcccagcccctgaagtactctggatgtcggccgactcggcgcaatggcttggtgcaatgcagtcattaaacgtctgtacagtcaatggcacccagccgattttcagcaccgcgcctgctgcgcaatctctccatggacttttccaggagttcctccaagatcaccccttgatgggacaggccggcctttctccgcagcacttaaggttgcttctacatccacttcaggcaatggtctgccatttgcgccagatggtgtcgtgtttttccgacgtttttagcacgccgcaccccgctggctgccctgtgaccaaggaatcgatacttcaccggttggacgaggtgcaggcgttattgcagaaatggtacgacatcaccatgaactacagcaagaccaacccagggtgtccagctacccattgcaacttgatcatgtaccatctggtttctctcaacacggtagctgacttctccgagatcgagaggttagcacgccgcgaggagttcggtggtctgcagtgggaattgccaattcgccacgggaagtgcatctttcatcgccaaaaagccatcattcactgtggtcaggtcatccggctcctacgtctgatgcccaaggaatgcaggccagcgtggtggccagcggccatgtaccgggctatgctgactctatgggccgacagcatatcaagggtcgatcctaatgcccggggagatgaacatgggaatattggatctcaggagtctgttctggtcatgattgatcagctaactctcgagcatccggcacttatcaactacctgtggagcggcaatggaatgcccttgttgacgcaaccgagggctgttattgccatgtttcgaccgacccttctctcgctggcgaggttgctaatgtgcctggtaaaaatatccagggcagagactgtgaactatgactggaatgtgacttgggtgtgggcaaccccggacggctttgggaggcccgtcatcggaatcaacaaccagtggccatgccctcccatccaggccaccgcaggcgacgtcgtcgtcgtaaacttgagcaaccagctgggaaatcagacgacaggcctacactttcacggcataaaccagatacaaacagccgacatggacggccccagcggcgtcactcagtgcgcaataccaccggactcgacaatcaagtatcaattcacggtcgacgccccagggaccttttggtatcattcccacaacatgggccagtatcccgacgggttgcgcggccccttggttgtgcaggatccgaacgatccttacaagggagactatgacgaggagcacatcttgactgtctcggattggtaccacaacgacagtatcacctcggtccgcaacatgctcaccccgtccaacaccctcttccagcccccgataccggacaacctcaccgtgaacgaagggcagggattgcatatcaatttcaccaagggcaaacgatatcgaatccgcatgataagctttgcggccttcggcgccgccatggttcacttcgactcgcacacaatgaacgtgatcatgaacgacggagcatacatcaagaaacaggacgcttatcagttgaggcttgcccctgctcagcgctacgacgtcttgctctcgcctaatgatagtgacgagggaaactaccccttcctggtctctctcgacattaaccgggactggaccaactcgtccgagaggtttgtgtggccacacaattacacgggttacctcgtcatggacgagtccaaaccgctcgacaggctcgacgtggtggacaaatggcagccggtggacgatgcccaattccaaccctatgatggggccgcggcctacagcacgtaccaaaagttgatgaagctcgactttgccttctgcttcgaccagaacggctaccctcgctcctgcttcaacaacctgacctacatcagccaacgggtcccgacgctctacagtgccgccacgacaggcgactccaacacgaatcccgttatctacggccaggtcaatcccttcatcgtcgactacgacgacacggtccagatcgtcgttaacaacattgacaccgcctcccatcccttccatctgcacggccaccacttccaggtgctgtaccgcgccgcgagcggggcgggcaactggacggggcgcgacgagaactacgcggccaacccgcccatgcgcgacacgatcaccgtcatgcccagatcgtacgtcgtcctgcgcttccgcgcgaccaacccgggcgtctggctgttccactgccacatcgagtggcacgtcgagatgggcctgacggcgaccgtcatcgaggcccccgaccgcctgcgcaacatggccttccctgacgaccacattgacgcctgtaagaagactggcacgccgtaccagggaaacgctgccgggaatatagggaacgcgaccgacaccacgggctttatcacggtgccgccgactacctattacggctcgacatacccgcccccgaacaccacgtctcaacggaagcgtcatacgccgacacagccaatgctcagaaaaagagtggtaccatttgccaagctcggctggctatggcatcattag

SEQ ID NO: 494 - protein, 1287 aa, Myceliophthora thermophilia
MESGLEDLMQQMGNDLAAADGSYPDYLPWSDFQDELDRYPSTVQLTRQDTSLCAIPNFANIPSPSELVVASSRTSINTPETSVMSLEYAAVPGTRDFATAVHSDSAVPEFEAVVLAEAEWNLARCNPPPPPGHCPKTAVVHLRILEQKSKQEDTWSALEEYLEKVEGDASDLAPVVPISSCTRDKLLAITQSFLHKALEIHRRGHNSCRKSGYCSPGDCNFIVLPPPKILEYFLRSYLRSLTVYYPLVTAGCVDPNEMLQDNQASTLLVLLMIAQGAAAMPLQEARYLSAGLTETCRISLFDIVEKDMGLSADPTTLRCALLFLVLGAWSGDKWLMDIAMGQRGMYMSMLKHAGMLGSQTAKNSKFDDNAINSEVQWRAWVERETRHRLVYNYVMLDQELSLFHDTAPLFAITELQCPLPAPEVLWMSADSAQWLGAMQSLNVCTVNGTQPIFSTAPAAQSLHGLFQEFLQDHPLMGQAGLSPQHLRLLLHPLQAMVCHLRQMVSCFSDVFSTPHPAGCPVTKESILHRLDEVQALLQKWYDITMNYSKTNPGCPATHCNLIMYHLVSLNTVADFSEIERLARREEFGGLQWELPIRHGKCIFHRQKAIIHCGQVIRLLRLMPKECRPAWWPAAMYRAMLTLWADSISRVDPNARGDEHGNIGSQESVLVMIDQLTLEHPALINYLWSGNGMPLLTQPRAVIAMFRPTLLSLARLLMCLVKISRAETVNYDWNVTWVWATPDGFGRPVIGINNQWPCPPIQATAGDVVVVNLSNQLGNQTTGLHFHGINQIQTADMDGPSGVTQCAIPPDSTIKYQFTVDAPGTFWYHSHNMGQYPDGLRGPLVVQDPNDPYKGDYDEEHILTVSDWYHNDSITSVRNMLTPSNTLFQPPIPDNLTVNEGQGLHINFTKGKRYRIRMISFAAFGAAMVHFDSHTMNVIMNDGAYIKKQDAYQLRLAPAQRYDVLLSPNDSDEGNYPFLVSLDINRDWTNSSERFVWPHNYTGYLVMDESKPLDRLDVVDKWQPVDDAQFQPYDGAAAYSTYQKLMKLDFAFCFDQNGYPRSCFNNLTYISQRVPTLYSAATTGDSNTNPVIYGQVNPFIVDYDDTVQIVVNNIDTASHPFHLHGHHFQVLYRAASGAGNWTGRDENYAANPPMRDTITVMPRSYVVLRFRATNPGVWLFHCHIEWHVEMGLTATVIEAPDRLRNMAFPDDHIDACKKTGTPYQGNAAGNIGNATDTTGFITVPPTTYYGSTYPPPNTTSQRKRHTPTQPMLRKRVVPFAKLGWLWHH

SEQ ID NO: 495 - DNA, 1590 bp, Myceliophthora thermophilia
  CDS (1)...(1590)
atgactcggcccccgggcctaatccacgaattccttcgacagctcgagtccagacagtcgcttcactccgaatccaaccctgacctgccgcgttacgatgttcagaacccaactgaccgggggctgctcgtgacgagcagtcgtccccagcgcttcttcctgggcaccggcgcttcgatatttaccaattacctgatacccgccatcacctctgcccagcatgaggtcattctggtcacctgcttttgggcgccctccagaacgttgacggctctgtgcgaggccctaagcaagctcgccgcacaccgtcgccgtctggttcaggaggcacgagcgacgggatcgactcccatcccgccgttgcacgtccgcatctgtctgtcgtcgcgctccctgcttcagaagctccttcatccgcaatctcgcagcggctatacctacccgcctgcctcgtggcacaagaagcttggcttgcctgaacccgcgctgctcgaagccggagggatccgcctcgaggccaagagtctgtttttcctgcccttcagcgtgatgcatcccaaatttgtcatcattgacaggcagagagcattcgttcccagttgcaacgtcagctgggagtcctggctcgagggctgtgtagagattacgggagacgcggttcgcgccctgttcgccttctactcgcgcatttgggaggatccggccgatactgagccagctcgcgatgcgtggtccgacagagtccccggagactcggaggcagctggcacttcttgggacggggccgaagccggccttgtcatggtacgtagcaccgctcgtctctgcgtagacctcgagtcgcacgacacggttgcgacgctcgtccttccctcatcgtaccatcgtaacccgcgcttccgcccgttcccctggcagaggtcccctccgccgcccgacacccctctcaatattgcgtccatgcagctcttcgagcgagcgcaacgatcaatctatattcagacacctaacctcacctgcgagagcgtcattatcgccctcttggacgccctagcaaggggcgtagaagtcaacattgtgacgaaccgcaacatgatgctgcttgagcagcttgtcacggcagggaccaccacatcttggtgtatcaggtcgttgattcgccgcttctgtcggcccaaggccgcactcggtggcaagcaaaaggctcagagcggtggcggcgacgcctcccgcgacctcgaagctggactaccaaacacgggcactcgagttggccgcctcctgatatggtactttcatgccaagaatcccagttctcccggggtcttggaggggcagcccgcggtcgctactcggccacagggagaggaaccggtccactcgcacctgaagctggccctcgttgacgcagaatatgcgttgctgggctcaggtaatcttgaccgcgcgagttggttcaccagccaggagttgggtatcttgtttcaaagccgcgagttgtgttccaagatcaaagctgctgtggacggcgttctagaagggagactcgatttgatattcgactcggaccacggcacggggagtaattaa

SEQ ID NO: 496 - protein, 529 aa, Myceliophthora thermophilia
MTRPPGLIHEFLRQLESRQSLHSESNPDLPRYDVQNPTDRGLLVTSSRPQRFFLGTGASIFTNYLIPAITSAQHEVILVTCFWAPSRTLTALCEALSKLAAHRRRLVQEARATGSTPIPPLHVRICLSSRSLLQKLLHPQSRSGYTYPPASWHKKLGLPEPALLEAGGIRLEAKSLFFLPFSVMHPKFVIIDRQRAFVPSCNVSWESWLEGCVEITGDAVRALFAFYSRIWEDPADTEPARDAWSDRVPGDSEAAGTSWDGAEAGLVMVRSTARLCVDLESHDTVATLVLPSSYHRNPRFRPFPWQRSPPPPDTPLNIASMQLFERAQRSIYIQTPNLTCESVIIALLDALARGVEVNIVTNRNMMLLEQLVTAGTTTSWCIRSLIRRFCRPKAALGGKQKAQSGGGDASRDLEAGLPNTGTRVGRLLIWYFHAKNPSSPGVLEGQPAVATRPQGEEPVHSHLKLALVDAEYALLGSGNLDRASWFTSQELGILFQSRELCSKIKAAVDGVLEGRLDLIFDSDHGTGSN

SEQ ID NO: 497 - DNA, 582 bp, Myceliophthora thermophilia
  CDS (1)...(582)
atgggtcgcttcctgacgacgacggcgttggctcttctcgcaacgggtggggcagctaccgcgagacctatcagggcttgtgacgtctctaccaagtaccttatcactttcggcgactcgtactcccagaccggtttcgacgtcacgggcaccaagccgtcggcgagcaacccgctcggcaaccctctgctacccgggtggacggccagcggcgggctgaactgggtcggcttcctggtctccgagttcaacacgtcgacgacgctgtcgtacaactttgcctacggcggcgccacgaccaacgccaccatcgtgccgccctaccagccgacggtgctcagcttcatcgaccaggttgcccagttcagcggcagcatcgcgaggaagccagactatgcgccgtggaacgccgacaatgcactctttggcgtctggatcggtgtcaacgatgtgggcaacgtctggtgggatcccaactatgactcgctcctcgagcagatcatggagagctacttcggtcagcttcagattctttacgacgcccggagccaggaactttgtccttctcagcgtgccgcgtaa

SEQ ID NO: 498 - protein, 193 aa, Myceliophthora thermophilia
MGRFLTTTALALLATGGAATARPIRACDVSTKYLITFGDSYSQTGFDVTGTKPSASNPLGNPLLPGWTASGGLNWVGFLVSEFNTSTTLSYNFAYGGATTNATIVPPYQPTVLSFIDQVAQFSGSIARKPDYAPWNADNALFGVWIGVNDVGNVWWDPNYDSLLEQIMESYFGQLQILYDARSQELCPSQRAA

SEQ ID NO: 499 - DNA, 1299 bp, Myceliophthora thermophilia
  CDS (1)...(1299)
atgcgttccgactcgcagtttgcgcctgaccgcggcgcacccgtagccaccacacgcaacggaacctacgttggccgctaccttgccgaattttcccaggaccttttcttggggatccccttccccaaagccgggcgactggaaaatccgtcaccttataacgagtcgtgggaagtcacacgatcagcagagtggcttggaaacatctgcccctgcccggcctccccgcaaagcatccgtaatgccaacgtgaccggaatatcggaagattgccgaaacctcaacaccatccggccgtcgcaagccacgctcaagaggaaggatgagaagctcccggtggctgtgtggttctacggcggagatattgccgatttctcctggatagtgcaggagagcctggcacaagacatggctatcatggccgtgacgctcaactacggagtcggcttcctcggctttccaggcggaacggaagttgcggctgcgggagtgacaaacctcggacttaaggaccagcgccaggcactacgctggatccaagagaacattgcggcctttgggggggatctggacaaggtgacagtatgggggcaatcggccggcgccaactccatcgcctaccagctgctggcttacggagctaagaccgacgagaagctgttccgaggcgccatcatgagcagcgggtcgatcggcattgggaacgccgtccaccccgatcgcgaagatgccgtgcaagggtaccgagccgttctcaacgcgacgaactgcctcgacgccgaggacgccctcggctgtctgcgcgccgtgcccctcgacgaggttttcgaagctggagaagcaacaggtacccatccgacgtggtggcccacagtcgacggtgacttcattccacagccgccgtccctccagctcgaggccggcgagttcctcgtgacgtgtccctcctctcagggaccaacgacgacgaagttgaagcgcttcgtcctggccgacatcgatccccatccagacgcagtaccaggcgcagccgggattcagtacagctacttctttcgcttcctccgagactacgatctgtacgggaacaacccgcctgtggcgacttcgagctcgcatctagtgctgttccatgctatctcggccatgctgatcgcgtatgtctacatgggcgattccaactcagtacatatctcgagcgtgccagtctggccaaagtatagcgtcaagaagccgtctaaccttgtcttcaatgctaccgagacccccgatgtcctgaacatacgcgttcgagcctga

SEQ ID NO: 500 - protein, 432 aa, Myceliophthora thermophilia
MRSDSQFAPDRGAPVATTRNGTYVGRYLAEFSQDLFLGIPFPKAGRLENPSPYNESWEVTRSAEWLGNICPCPASPQSIRNANVTGISEDCRNLNTIRPSQATLKRKDEKLPVAVWFYGGDIADFSWIVQESLAQDMAIMAVTLNYGVGFLGFPGGTEVAAAGVTNLGLKDQRQALRWIQENIAAFGGDLDKVTVWGQSAGANSIAYQLLAYGAKTDEKLFRGAIMSSGSIGIGNAVHPDREDAVQGYRAVLNATNCLDAEDALGCLRAVPLDEVFEAGEATGTHPTWWPTVDGDFIPQPPSLQLEAGEFLVTCPSSQGPTTTKLKRFVLADIDPHPDAVPGAAGIQYSYFFRFLRDYDLYGNNPPVATSSSHLVLFHAISAMLIAYVYMGDSNSVHISSVPVWPKYSVKKPSNLVFNATETPDVLNIRVRA

SEQ ID NO: 501 - DNA, 4017 bp, Myceliophthora thermophilia
  CDS (1)...(4017)
atggtactggatagcagtaaggggatctggaaagacatctgcaacggtcggccagcaaccgtcattgttcgtcacggtggcatggaggtgtatcacatctcccaagagcactcacaccggcaagcatattccttgcagtcgtatgggcacgatgatccgccgcagcactgcgctaaatcacgaggtcggcagcctggcgtcgccagggtcgcggctgaagatccaggccagcattcggatgaaccctcctcctcctcctcctcctcctcctcctcctcctcctcctggtcggccgaggaccagatcatcatctcgcagtgcgcctgcttcgtcttggagtacgccctggcggagacctggaggcactggggcgtcactccggacctggtgattgggcatagcatcggtgaatacgccgcgtttgcgttcgccggcatgatcggctgggaagacgcgctcctcctgctggccgggagggcgcgcctcctggcgacccggtgcccgccccaggtcaccggcatggtggcgtgcaggctgtcgcgggcggccgtggagcagctgctggccgacaaggcggacgagctggcgggcatcaccgtctcgtgcttcaacagcccgtccgactcggtcctggccggccccgtggactcgctggcgaggcttgcccggcactgcaaggacaacgggatccggcacaagcgcctcgacgtcccctacggtttccactcgcccgccttggaacccatcttgagcgaccacggccgggccgcccgcgccgtccccttccgcccgccctccctgcgcgccgggtccagcttgcgtggcaggctgttcgggcagtccgagacggtcgacggcgactactttgtccagcatgctcgcgagcccgtcaacttctccggtgtggtcgaggacgccctgccggagctggctggctcccatcccacttttatcgagattgccgagtccatgttgaagcaaatcatcaacacatccctgtcctacaccttcttggggtcgctgactccgacccgcgccgcctgggactctctgagctcggctttgcgagagctctacctgcgcagatacgacatcaagtggcggcgagtctacgacggctcgcaggcaaagttcgtcaggggtttcccggggcacccgctcaacttggcgacgtactacgtcccctacaaaccaccgtcccgccaggacaagcttcttccggggtttttttcggggccgcagcagcccccgccgaggcccaagtacgccttcctgaccgacgtctcgccggctgtcgaggacggcagcgcgacaaggtacgcgtcgacggccatggagccgatcaagaagttcgtcgacgcccaccaggtcggcgacgtgcccttgtgcccggcctcggtgtacgtcgaggtggtggcgcaggcgctggcctaccacgcttccctcgacatcgcgtccaacgtgttcatgttcgagaacgtcaagttcgaacaccccttggtctgcggagacgacgccgccggcggctcgtcgcgccaagtgataaagacggcgctcaacatgcagcccgtcgagggccagagctacgtgtgctcgtccgggtcgggggacacgctctgcgcgggaggcgtccgcagtctcgaggtcggctcgcaggccgtcgtcgacatcctggcccggaggcgcgggcgggtagatcggctcaggaggtccgtcgacggcgcgccccggagcctggccgagtccttctcggaccggaccatctaccacgtcatcttcccgcgcgtggtccggtacgacaagccgctcatgacgctgcgccagctgacgaccgtcgcggccggctccgagggccacgggtacttcacgctgccgctgccccccaaccccggccggtacgtgagctcgccggccctggtagacacgctgctgcacgcccccggtttcatggccaacacgctcgtggacgccgacacggcctgcatctgcgtggcgctggagcaggccctggtgcccagcgacagcccctcgctgcaccggcaggagctgcaggtctactgctcgctggtcgacattgagcactctcttatcgccgacgcctacgtgctcgacgccgagggcagcatcgtcggatacgtcaagggcatgtgcttcaagaagctgaagctcaagcccttcaaggcccacctctcgcgtcagctcgcccgccgccgcccggctgccgctgctcctgctcctgctccagctcctgtccctgccgggccgagtagtggcagcgtggggggcgggggcaggggcagacccgtggcgggagactacaccacggcgacgaccaagacgacggcgacggcgacggagatatcgagcaccgtgtgctccatcgtccgcggcctgtgcggcgtggactacgagccgaccgaggcgaccacgctggccgagctcggcctagacagcctcctgtccgtcgagctctcccacacgctggccaagacgctacggtgcaccgtctctccggaccagctccaggaatgctccgacctggcccaggtcgtccagttggtcgccaagaacagccccctccagcaccagctccagctccagcaacacgagcagcagcagcagcagcagccgaccgcgccccccacgactgccgcgccctcggtcctccagttcacgcccgcgacttcgtccctcgatagcagcgcctcctcgtcgtttcagccggaccagccggcgaccccgaacaccgagtacaacaacatcgccaccagcagcaccaccagcagcaccaccaccaccaacagcaacaacatcaacagcaataacaacaagccgacgacaggcaacgccgggtccgccgccgccgccacctccctgcccgagttccagtccctcttcctggccgtgtgcggagtgctgcccgaggacgaggacgacgagcggagcgtgccgctgtcggcgctcggggtggactcgctgctgtcgatcgagctctgccaggcgctgcgggacaagctcggcgtcaccgtcgaggaccacgacgccgtcggcgacctgacctaccgccagctgcacgacatgtgcgcctgcgccgccgcgaccaagctctctcccggccccgcctcgccgtctcccgaggctgccgcaccatcacctcctcctactccccaaacggcgccgggcatccggcagctccagaaacgcggcgacgggagcggtagaagtggtagcggtagcgggagcggcggccccctgtacctcttccacgacggcagcggcacctgcggcatgtacgcccgcgtcggccccctcggccgcgacgtctacggcgtccccagcctgcgctccgacgcccagacgctcgaggccctcgcggccgattacatccgccaggccaacctcggtgcaccccagggagggcctctgatcctagctggctggtccttcggaggcgtcctggccttcgagatcgcgaggcagctggggggagccgtcgtaaagggcgtcgtgctgatcgactcgcccgcccccgtcgaccaccagcccctccccgccgaggtgatccatcaggtcgtgtccggccggaggtcggcgtcggcgtcggcgctggcctcggcgtcggcgcgggagatgcaggaggcggtcgaggccaacttcaagcggttcgccgccatgctgggggactacagccgccgccaccaccaccaccaccaccaccgccaatcgccatcggcaggccggtcgtcgtcgtcgtcgtcgtcgtcgtccccgccgccgtgcgtcatggtgcggtgcgtcaagaccatggaccgctccgccctgggcggcgcccactacccctggctcggcgacccggccgaggcggaccggtccatccgcacctgggagcgcctcctgggccgccagctgcccgtcttggaactgcactgcgaccactttagtccgtttgagcccgagaacgttggggagctcacgcagcacttgagaacggcttgtgagatgttggaggactattag

SEQ ID NO: 502 - protein, 1338 aa, Myceliophthora thermophilia
MVLDSSKGIWKDICNGRPATVIVRHGGMEVYHISQEHSHRQAYSLQSYGHDDPPQHCAKSRGRQPGVARVAAEDPGQHSDEPSSSSSSSSSSSSSWSAEDQIIISQCACFVLEYALAETWRHWGVTPDLVIGHSIGEYAAFAFAGMIGWEDALLLLAGRARLLATRCPPQVTGMVACRLSRAAVEQLLADKADELAGITVSCFNSPSDSVLAGPVDSLARLARHCKDNGIRHKRLDVPYGFHSPALEPILSDHGRAARAVPFRPPSLRAGSSLRGRLFGQSETVDGDYFVQHAREPVNFSGVVEDALPELAGSHPTFIEIAESMLKQIINTSLSYTFLGSLTPTRAAWDSLSSALRELYLRRYDIKWRRVYDGSQAKFVRGFPGHPLNLATYYVPYKPPSRQDKLLPGFFSGPQQPPPRPKYAFLTDVSPAVEDGSATRYASTAMEPIKKFVDAHQVGDVPLCPASVYVEVVAQALAYHASLDIASNVFMFENVKFEHPLVCGDDAAGGSSRQVIKTALNMQPVEGQSYVCSSGSGDTLCAGGVRSLEVGSQAVVDILARRRGRVDRLRRSVDGAPRSLAESFSDRTIYHVIFPRVVRYDKPLMTLRQLTTVAAGSEGHGYFTLPLPPNPGRYVSSPALVDTLLHAPGFMANTLVDADTACICVALEQALVPSDSPSLHRQELQVYCSLVDIEHSLIADAYVLDAEGSIVGYVKGMCFKKLKLKPFKAHLSRQLARRRPAAAAPAPAPAPVPAGPSSGSVGGGGRGRPVAGDYTTATTKTTATATEISSTVCSIVRGLCGVDYEPTEATTLAELGLDSLLSVELSHTLAKTLRCTVSPDQLQECSDLAQVVQLVAKNSPLQHQLQLQQHEQQQQQQPTAPPTTAAPSVLQFTPATSSLDSSASSSFQPDQPATPNTEYNNIATSSTTSSTTTTNSNNINSNNNKPTTGNAGSAAAATSLPEFQSLFLAVCGVLPEDEDDERSVPLSALGVDSLLSIELCQALRDKLGVTVEDHDAVGDLTYRQLHDMCACAAATKLSPGPASPSPEAAAPSPPPTPQTAPGIRQLQKRGDGSGRSGSGSGSGGPLYLFHDGSGTCGMYARVGPLGRDVYGVPSLRSDAQTLEALAADYIRQANLGAPQGGPLILAGWSFGGVLAFEIARQLGGAVVKGVVLIDSPAPVDHQPLPAEVIHQVVSGRRSASASALASASAREMQEAVEANFKRFAAMLGDYSRRHHHHHHHRQSPSAGRSSSSSSSSSPPPCVMVRCVKTMDRSALGGAHYPWLGDPAEADRSIRTWERLLGRQLPVLELHCDHFSPFEPENVGELTQHLRTACEMLEDY

SEQ ID NO: 503 - DNA, 822 bp, Myceliophthora thermophilia
  CDS (1)...(822)
atgtatttgtcagaagagtggcttgcctacgagcggaagctgggtttccggcctgtcatcatcggcacggcccaggagatccgcactgggtacaactcgcttgcccagaccattggcaagcagctgccgccgcacgatcccacgctgacagttcacaactgccgctacatcgcccaaaacacaccttgcatcctcgtctcggtcgacttccgcctcgcccctgagcaccccgtcccagctcaggttgacgacgtgctcgccggttacctctggacccgcgaaaacattgatgccctgaacggcgacccggccaaggtcttcttgatcggcgcctcggtgggcggcgggctggcgctgagcgtggccctcaagctgatcgcgcggggccagggtgggcaggtggccggcatcgtggcgctggcgcccatcacgatgcacccggagcacgtcccagacgagttccgggccgactacacggcgtacgaggagaacgccgagggcccgctcatcaaccgcgccgccatgtatgtcttcaactcgatcaacggctgcgacgagcgcaaggacgacccttacgtcttccccgccctgcaccccctcctcgggtccgagctgccgcccacctacatctccacctgcggcgccgaccccctgcgcgacgatggcaccgtcatccagcgcgccctctcccgccacggcgtccgctgccgcctcaagaaccacgagggcctgccgcacttcttctggatctaccccgaaatccccaccggcgacaccttccgcgccgacacggtcgagggtgtcaggttcgtgctagagtga

SEQ ID NO: 504 - protein, 273 aa, Myceliophthora thermophilia
MYLSEEWLAYERKLGFRPVIIGTAQEIRTGYNSLAQTIGKQLPPHDPTLTVHNCRYIAQNTPCILVSVDFRLAPEHPVPAQVDDVLAGYLWTRENIDALNGDPAKVFLIGASVGGGLALSVALKLIARGQGGQVAGIVALAPITMHPEHVPDEFRADYTAYEENAEGPLINRAAMYVFNSINGCDERKDDPYVFPALHPLLGSELPPTYISTCGADPLRDDGTVIQRALSRHGVRCRLKNHEGLPHFFWIYPEIPTGDTFRADTVEGVRFVLE

SEQ ID NO: 505 - DNA, 1680 bp, Myceliophthora thermophilia
  CDS (1)...(1680)
atggccaaagtagcagcagcggcaatcgttgccgaacaagtcgccgcaacaggcgttgaagcagcggcagcgattgcgatcgcagcgcccaccctccccctcaagatctgcctcactcacctgccaaatccagcccccaaaggctcgccccacccggcactcgcccgctcccagcacaccctcaccgtcatccgcaacaaggccttcatatttggcggccaggacgcctccggcgcgctctgcccgccaggaatccacaccatcaccctcccagccgcgcccacggtcgccacggaccccgccagcgcctcctctctctccggccggggaggcggcggcggcggcggcggcaaggagcaggaggagggagaggagggcggagagccggacgcgggagccgcgtatacgtgctacccgccctacacgctgcaggacgcctcgacgggcgagacgctagtgccgcagccccgggcgggacacgccgcgtgcgcgcgcggcgggcggtacctgctcgtccagggcggccgcggcgcggacgggaggcccgtggaggagggcaactgcatctggcagtgggactgcgagggcctgagctgggccaagctgaggggcccatcgcagctgggggtggagatggccccggggcgctgggggcactggatgtttgcggacgaggaccaggggttcttggtgatggtgggaggcaagacaagggatgatggtggcggtgatggaggagggtcggagagggaggcgtggatgtatgacctccatgcggccgcgtggacgacgttgccgcgattgacggcccggccgctggcggcggcgtacgcggcggggaagatctatattatctcgagtggcgaaggagatatcgctcccggagacgccaagttgggcggaatggtgcacttcctggacatgagggagtcgccgacggagcgggagaagcccggcgcgttggcgtggcagagcgttcggttcccggcaaatccactcgctccagggccgcagccaagggcaggcggggcattggtgccgctgagaaccgggcacgggagagtgtacctggtttacctgtttgggtgctctgatgaggggggtcgtaaaggggagaaagagtactattcggatatctggacgctgcagctgcccgctcagacacgcagtgccgccgctgtcaaagacaagatccgggagaagctgccccgttttgagtctggggagtttcgatgggcagaggcagagattgtccctacggaacagatagcagcggatggagcccagaggttcggcctgcatgtgtttatgcgtctgtggttagagctcctatttggagagtctgacaatgacctcaaatgtgccttcttcttctgtccggcctacagggcggcgcgggcgcgcatcgctgcgcacggcggagaggtgcccgtgtacagttacgtgtacgcggggaacttcagcaacatcagccccaagggctggatgggcgcgcaccacggggcggagcagccgatggtgtttggtacgcattcactcgttcggggcgagtcgaccgaactggagtatgtgacaccgtatgcgatgcaggacgcgggggtcagctttgtggcgacggcggggagggggatgacggtggagggatgggatgcgaaggggcaagtaattagatggtggtag

SEQ ID NO: 506 - protein, 559 aa, Myceliophthora thermophilia
MAKVAAAAIVAEQVAATGVEAAAAIAIAAPTLPLKICLTHLPNPAPKGSPHPALARSQHTLTVIRNKAFIFGGQDASGALCPPGIHTITLPAAPTVATDPASASSLSGRGGGGGGGGKEQEEGEEGGEPDAGAAYTCYPPYTLQDASTGETLVPQPRAGHAACARGGRYLLVQGGRGADGRPVEEGNCIWQWDCEGLSWAKLRGPSQLGVEMAPGRWGHWMFADEDQGFLVMVGGKTRDDGGGDGGGSEREAWMYDLHAAAWTTLPRLTARPLAAAYAAGKIYIISSGEGDIAPGDAKLGGMVHFLDMRESPTEREKPGALAWQSVRFPANPLAPGPQPRAGGALVPLRTGHGRVYLVYLFGCSDEGGRKGEKEYYSDIWTLQLPAQTRSAAAVKDKIREKLPRFESGEFRWAEAEIVPTEQIAADGAQRFGLHVFMRLWLELLFGESDNDLKCAFFFCPAYRAARARIAAHGGEVPVYSYVYAGNFSNISPKGWMGAHHGAEQPMVFGTHSLVRGESTELEYVTPYAMQDAGVSFVATAGRGMTVEGWDAKGQVIRWW

SEQ ID NO: 507 - DNA, 1218 bp, Myceliophthora thermophilia
  CDS (1)...(1218)
atgaagctctcggcgtctctggccttggctgcggccatgggggcctcggccaccttcaacattcccgcctttgagcagtccgctatcgactccggcctggctcttgctggtctgaacggcatcgccctgctgcagtcagccaccaggtacggcgggtcgtgcaatcttgggaacgtcaagatccgccgagaatggtatgtcgatcacccgtcgaccctgatctcctgcattccgcaacagctccgtgttgacccggggattaggaggacgctgtccaaagcccagcggaagagttacatcaaggcggtgcagtgcgtccaagctaagcccagcagactggccgagggtattgccgctgggtccaagacgctcttcgatgactttgtttacgtacacatgaatgcgaccctcttcatccactacaccggcaacttcctcatctggcaccgcaacttcatccacgtgtacgagaaggagcttaacgcctgtggctacaaagatgccctcccctattgggaatggggcttcgatgtcgaggcgccacacctttcacctgtctttgacgggtctgatacatcgatgagtggcgatggcgagttcgtccctggccccccacttgagctcctggttcccggcaacgccgagcccgtggtactggcgaagggtactggtggcggctgtgtcaagacgggcccgtttgccaacatgacggtccggttgggcccaatcacgcagccggacccgaccgcggacaacccgcgctgcctgaagcgcgacctgaacgccgatgccggcaagcgcttctctagcttccgcaacacaacgaacctcattatcaactcgcccacgatcgagtatttccggaccaccatggagggccaccccaactatgtgcccaactcgctgggggtgcacggcggcggccacttcatgatcagcggcgacccgggcgcggatgccttcatctcgcccggcgaccccgcgttctaccttcatcatgcccaaatcgatcgcgtctactggatctggcagatgctggattttgagaaccgccagggcgtcttcggcaccaacactatgctcaactaccctcccagcgagaacaccaccgtcgaggacaccgtcgatgtgggccacctcggcggcccaatcaagatcaagaacctcatgagcactaccgggcaaaatggctctcctctttgctacatttatctttag

SEQ ID NO: 508 - protein, 405 aa, Myceliophthora thermophilia
MKLSASLALAAAMGASATFNIPAFEQSAIDSGLALAGLNGIALLQSATRYGGSCNLGNVKIRREWYVDHPSTLISCIPQQLRVDPGIRRTLSKAQRKSYIKAVQCVQAKPSRLAEGIAAGSKTLFDDFVYVHMNATLFIHYTGNFLIWHRNFIHVYEKELNACGYKDALPYWEWGFDVEAPHLSPVFDGSDTSMSGDGEFVPGPPLELLVPGNAEPVVLAKGTGGGCVKTGPFANMTVRLGPITQPDPTADNPRCLKRDLNADAGKRFSSFRNTTNLIINSPTIEYFRTTMEGHPNYVPNSLGVHGGGHFMISGDPGADAFISPGDPAFYLHHAQIDRVYWIWQMLDFENRQGVFGTNTMLNYPPSENTTVEDTVDVGHLGGPIKIKNLMSTTGQNGSPLCYIYL

SEQ ID NO: 509 - DNA, 2310 bp, Myceliophthora thermophilia
  CDS (1)...(2310)
atggcgacgacaaccgagacggcgccgctgtcggcaccagtgcccgtcgagctccccgaagcatcgcgattcctcaacgatagccaatggaaggttctcatgagcctcatggacgccatcatccccgcggtccgcatccgggactcggcaggggacaccaaggccgcccaagatgcttctaccacccaccttccgggcgcagaatattccgagacggcagccaagctccggaaggccgttacgcctctcgacccttcgtcagaaatcctcgaagcgtaccttgccgagcggccctcggagagtccggcctttgcccagctcctcaccttgatcctctccaatattccaccaagcaagcagcgcgagtttcgcatcctcctctccgtcctcaatactcgccctggcagcctgctcctgacctcgcgcgccaccccgcttccgtctctccgcctgtccgagcgggtcaagatcctccagagctggtccaactcgcctctctggtccctccggtcgctcttcaagagcatgacgaccctcggcaagctggccttcattcgcagcagcgccaacttccccgcgctgacgggcttcccggcggtcccccgggattggacgtccgggtcgacctcgcacccgtacgagtttctccagttcgaggccgcgtccggaaccggaaaggccccggtcgagatctcgaccgacgtcgtcatcgtgggctccgggtgcggcgccggggtggtagcgaagcggctggcgtccgagttcggcccctcgctcggggtcctggtgctcgagaaggggcggcacctggacgcgcgccacttcccgctgtcgcaggcgaccgggctggccaccctgttcgaggccggcggcgtggtcgagacggacgacgggtcgatgacggtcacggcgggcagctgcttcggcggcggcggcaccgtcaactggagcgccgccctgcagacacaagactttgtgcgcgccgagtgggcccgcacccaccgcttgcccttcttcgagtcggccgacttccaggcctgcctcgaccgcgtctgggacgccatgggctgcaccggcgacaaggtcgcgcccaaccacgccaaccgcgtcctgctcgagggcgcccggaagctgggctaccaggccaaggtggtgccccagaactgcggcggaagcgagcaccactgcggctactgcaccctcggatgctggaagggcgagaagaagggccccgtcaacggctggttccccgatgcggccgagcagggcgtccagttcgtcgagcgcatgaccgtcaagagggtccttctggaccacaagaagggcaaaaaggtcgccaggggagttcagggcgtctggaagtcccgcgacggccgcgaggtcgaggttatcgtccgcgcaaagaaggtcgtcctcagctgcggcaccctctggagcccggtcgtgctgatgaacagcggcatcaagaacccccagatcggcaagaacctacacttgcatccgaccaactttgtgtccggcatctttgacgaggatgtccagccatgggagggcggatctctaacctcggtggtcagctcgtttgagaacctcgactccaagggccacggtgtcaagctcgaagccatgtccatgatgccatccttctgcctccccttcctcccctgggcctcgggcaccgactacaaggtgctcgcggcgcactaccggcgtctcaacaccttcatcgccatctgccgagaccgcgacatgggctccgtctaccgcgacccgaccaccggccgcccccggatcgtctacaccccgtccgacttcgaccgcgcccacaacctgcgcggcgtgctcgagctctgccggatcctgtacgcccacggcgccagggagatccacccctccatcgccggcttcccgcccttcatccgcaggacgaaggaggaagataacaagcccgagggcagggacaaagacaaagacaagcacaaagacaaggacgaggacgaggagaaggagaagcgcgagttcgaggagtggctggggcggctcaaggcgcacggcaacaagccgcccgcgacgccgttcgcgtcggcgcaccagatgggcacatgccgcatgagcgccaggcccaaggagggcgtcgtggacccgcgcggccgcgtctggggcgccgagggcctctacgtcgccgacgccagcgtctttcccagcgcgagcggcgtcaaccccatggtcacgaccatggccatcgccgactggatcggacagggcgtctgcgaggacctcaagaaggacgggatcccctcgaagctgtaa

SEQ ID NO: 510 - protein, 769 aa, Myceliophthora thermophilia
MATTTETAPLSAPVPVELPEASRFLNDSQWKVLMSLMDAIIPAVRIRDSAGDTKAAQDASTTHLPGAEYSETAAKLRKAVTPLDPSSEILEAYLAERPSESPAFAQLLTLILSNIPPSKQREFRILLSVLNTRPGSLLLTSRATPLPSLRLSERVKILQSWSNSPLWSLRSLFKSMTTLGKLAFIRSSANFPALTGFPAVPRDWTSGSTSHPYEFLQFEAASGTGKAPVEISTDVVIVGSGCGAGVVAKRLASEFGPSLGVLVLEKGRHLDARHFPLSQATGLATLFEAGGVVETDDGSMTVTAGSCFGGGGTVNWSAALQTQDFVRAEWARTHRLPFFESADFQACLDRVWDAMGCTGDKVAPNHANRVLLEGARKLGYQAKVVPQNCGGSEHHCGYCTLGCWKGEKKGPVNGWFPDAAEQGVQFVERMTVKRVLLDHKKGKKVARGVQGVWKSRDGREVEVIVRAKKVVLSCGTLWSPVVLMNSGIKNPQIGKNLHLHPTNFVSGIFDEDVQPWEGGSLTSVVSSFENLDSKGHGVKLEAMSMMPSFCLPFLPWASGTDYKVLAAHYRRLNTFIAICRDRDMGSVYRDPTTGRPRIVYTPSDFDRAHNLRGVLELCRILYAHGAREIHPSIAGFPPFIRRTKEEDNKPEGRDKDKDKHKDKDEDEEKEKREFEEWLGRLKAHGNKPPATPFASAHQMGTCRMSARPKEGVVDPRGRVWGAEGLYVADASVFPSASGVNPMVTTMAIADWIGQGVCEDLKKDGIPSKL

SEQ ID NO: 511 - DNA, 1194 bp, Myceliophthora thermophilia
  CDS (1)...(1194)
atggtccatctgacctcagcccttctcgtggccggcgcggccttcgccgcggctgcgcccatgaaccacatctttgagcgccaggacacctgctcggtcagcgacaactacccgacggtgaactcggccaagctccccgacccgttcacgacggcagcgggcgagaaggtgacgaccaaggaccagttcgagtgccggcgggccgagatcaacaagatcctgcagcagtacgagctgggcgagtacccgggaccgccggacagcgtcgaggcgtcgcttagcggcaacagcatcaccgtcagggtgacggtcggcagcaagagcatctccttctcggcctcgatcaggaagccgtccggcgccggcccgttccccgccatcatcggcatcggcggcgcgtccatccccatcccgagcaacgtggccaccatcacgttcaacaacgacgagttcggcgcgcagatgggcagcgggtcgcggggccagggcaagttctacgacctctttggcagggaccactccgccggctcgctcaccgcgtgggcctggggtgtggaccggctcatcgacggtctggagcaggtcggggcgcaggcgtcgggcatcgacacgaaacgtctcggcgtgacgggctgctcgcgcaacggcaagggcgccttcatcacgggtgcgctcgtcgaccgtatcgccctgacgatcccgcaggagtcgggagccggcggcgcggcctgctggcgcatcagcgaccagcagaaggcggccggcgccaacatccagacggcggcgcagatcatcaccgagaacccctggttctccaggaacttcgacccccacgtcaactccatcacgtcggtcccgcaagaccaccacctactggccgccctgatcgtgccccgcggcctggccgtcttcgagaacaacatcgactggctcggccccgtgtcgacgacgggctgcatggccgccggccgcctcatctacaaggcctacggcgtgcccaacaacatgggcttctccctcgtcggcggccacaaccactgccagttcccgagcagccagaaccaggacctcaacagctacatcaactacttcctgctcggacagggctcccccagcggcgtcgagcacagcgacgtcaacgtcaacgtcgccgaatgggcgccgtggggcgccggcgccccgactctggcgtga

SEQ ID NO: 512 - protein, 397 aa, Myceliophthora thermophilia
MVHLTSALLVAGAAFAAAAPMNHIFERQDTCSVSDNYPTVNSAKLPDPFTTAAGEKVTTKDQFECRRAEINKILQQYELGEYPGPPDSVEASLSGNSITVRVTVGSKSISFSASIRKPSGAGPFPAIIGIGGASIPIPSNVATITFNNDEFGAQMGSGSRGQGKFYDLFGRDHSAGSLTAWAWGVDRLIDGLEQVGAQASGIDTKRLGVTGCSRNGKGAFITGALVDRIALTIPQESGAGGAACWRISDQQKAAGANIQTAAQIITENPWFSRNFDPHVNSITSVPQDHHLLAALIVPRGLAVFENNIDWLGPVSTTGCMAAGRLIYKAYGVPNNMGFSLVGGHNHCQFPSSQNQDLNSYINYFLLGQGSPSGVEHSDVNVNVAEWAPWGAGAPTLA

SEQ ID NO: 513 - DNA, 1185 bp, Myceliophthora thermophilia
  CDS (1)...(1185)
atgacaaacgtagcctccagtcttgttccaattctcgtgcttggtttgcccttgggtctatacacactgtttctgagcctgagcacgatcccgtattttcagcgaaacttcctctatgcgcacaagatccacacgttgtggtgggggaacatcaacgaaccagagcaatggggcttcgcaaagaaccaagtcacccccttttacctcaccaccgcggataaccagacgctctacgcatggcacatacttccccttcccctctacgtccagcacgaagacaaactctcctctcaaccaagcggtttctgccatgatataacggccaccgagaacttccgcctcctccgtgatgaccccacggccaagctcatcatctccttccatggtaacgccgcgcagctgacccagggccgccgcccgccccactaccataccctcacctctctccacagcccataccacctgctcaccctcgactaccgcggcttcggcctcagcagcggaacgcccacggagcgagggctcatcctcgacgccgccgccgctctcaggtgggccgtggacaccgcgggcgtgcccccctcgcggatcgtcctcgtcggccacagcctggggaccgccgtggcggcggcggccagcgagctgctcacgctgcacgagggctgggactttgccggggtcgtgcttgtggccggcttcagctcgctgccggagatgctgagcgggtacgcgatcgccgggtggctgccggtgctgcggccgctgacgtggtggccgtggctgtcgaacaagctgatggcgcgtgtggtggacacgtgggacagtgccgggagatggagggatgttgtcagggcggtaaaggaaaggcgtgggcggttgaggctgagcctggtacatgcgaaggacgactgggacattccgtctcatgagagtgacaagctgtttcgggcggccgtggagggcttggtcgggggcgggatgggagaggagcagtttgaggcagagaagaggaaaaggatggtgattaaggggaagaactcgtttactgcaacatggaaagagggggatattgtggtaaagcaggagttgttccctcacggaggacacaacggagtcctgactcatactcctgtactgatggccgtcatgagatcattcgggcttgatgaccaatccgcgccctga

SEQ ID NO: 514 - protein, 394 aa, Myceliophthora thermophilia
MTNVASSLVPILVLGLPLGLYTLFLSLSTIPYFQRNFLYAHKIHTLWWGNINEPEQWGFAKNQVTPFYLTTADNQTLYAWHILPLPLYVQHEDKLSSQPSGFCHDITATENFRLLRDDPTAKLIISFHGNAAQLTQGRRPPHYHTLTSLHSPYHLLTLDYRGFGLSSGTPTERGLILDAAAALRWAVDTAGVPPSRIVLVGHSLGTAVAAAASELLTLHEGWDFAGVVLVAGFSSLPEMLSGYAIAGWLPVLRPLTWWPWLSNKLMARVVDTWDSAGRWRDVVRAVKERRGRLRLSLVHAKDDWDIPSHESDKLFRAAVEGLVGGGMGEEQFEAEKRKRMVIKGKNSFTATWKEGDIVVKQELFPHGGHNGVLTHTPVLMAVMRSFGLDDQSAP

SEQ ID NO: 515 - DNA, 4332 bp, Myceliophthora thermophilia
  CDS (1)...(4332)
atggcaagtgtgctccgggcctcgtaccaagcgtccatcaacaagcacccgagccggttcgaactgaccgccgtttaccaacacccgcaagccaaggccgacattgttctcgtccacggcctcaacggggccccggataagacatggacggccccgaacggcgtctactggcccaccgacctgctcccggcctccttgaaggatcagcatgccaacgtgctggtgtacgggtacaacgccgacgtatatggggccttctgggagcggcacgcaaagaacccgagcgacaacttcatccaccatcatgcccagaccctcgttgccaccctcacacactaccgtaagagcgtgggcaccgagcggaacccgatcatctgggtggcccacagcctcggcggaatcgtcaccaagcgggcgctgctgtactcgaacgatgtacgggatccgaatcaggaggacctccggtccatctacgtctcgacctttggcatcatcttcttgggcaccccgcacaatggatcggacgcggccacttggggcggcatcatacaaagaatggctgacgccgtcgtcccgaggaagatatttgacaccgagtcggtgctgctcaagtcgctaaagaaggacaacgagacgctgcaggaaatatcgaaccacttcctggacatctaccaaaaattcaagatccatatggcgcatgagaatcagaagacagatgttaaggggtcaaaaatgctggtagtagatgcgtcgtctgcgagcccccagctcgtcggtgtcacgtactacggcatcgaggctacgcattcccgcatgtgcaagttcgacagcgaaaatgcgcccggctaccgcaccgtctccacggcgatccgggaatgggtcgccgacgccccaaacgtcattccgatccgttgggaggttgaagaggatcagcgtcgtgtgagggcgaacctcgagaactttgagcgttctcgtcagtatcatagtcctgcccttgttcctgtcgaccgcccgcaaacaatagcccatggcggtagtgaaacggtttcttctcatctccagcagccgcctcctcttgacgaagggcgctctgtctcggcgcccctcctcaccgaagccaccaaagaagctccgtcctcgctccggccatcgtctcactcccccaagctcctccccgccatacccgacgctccgggcggccttccggatcccgaccacgaaccgctgtttatccacccggaaaccttccgccccaattcgtatttcgtcggccgcgaggacgagctccgcgggctgcacgagatgctcatggaccgcaagcggcgctccgagggcacctcggccgtgctaatccagtgtctccccggcggcggcaagacgcacctcgcgcggcaatatgtctttcagcaccggagcgattaccccggcggcgtgtactgggtgcgcgccgattcgcgccaagagctcgagtattggttctggcgcatcgcgcggaacgaggcgctgaggggcctggtcgaccggaaggacgtagacgagctgcgggatccgaagaagattgtgcagatcgtgaggcggtggctgaattcgcagtcggactggctgatggtgctcgatggcgtgcagttcgacacgccgggcctgcacgagttcataccggacgcgaggaacaccagcctgatctacacgtcgacggagcgggccgtgacgggagatccgcggttcgataacccgcaggtcatggagctggggctgctgacggcgcagcaagcgcaggatctgttgttgctggaactggagagaaagcggccctggagtgccgaggaccaggccatggcgctggagcttgtcggcttgatgggcaggctgccgctgatgatccacgtggctgcgcagcatctcaaggctaccagggagccgctggcgaggtacctgaggtcgtatcggagccggcccaaggcgggagacctgccggcttacaaagcggtgcgcgagcagctggaaaaccggggcgaatatgcggcgctgaacctgatgtcgttgttggtcttctttgaccagcacatcccggtcgagatgcttgcgctaggactctccgctctcgataaggtgactcccgtcaagactctcgacgccatgcaccgaaaagcaagtctcaacaacaccctcaaggtcctcattgctttcgcccttatcgagcggtccgagagcgatgatatctcgcctacgagctcgcgcagctccaagcgcagctttgacagacatgcggactatctcgacctgctacgcatccacagcgttgtccaagctttctttattgactcgctgtacgagcagcgccagattcctttctggctggagcgggcagtggccgtgtgggcgaggtcgtatgacgaagcggacaggaggatccaggaggaccctcgggtaggcctcccggatgactatcgccggttctgcatccacggcgaaaagctgctgaagaacctcaaccggttcgagaagcgatacccaaagctctcagtggcccggtcgcccctggaagagcgactgaaaaaaatccaggggcagattgacgacttgtcgcatgctatccaaaagaacatcgtggacggctccgcggaggagtacccggcatccgtctttgaccggatcagcgcctcctcgcagtccgacgtcgcaacgatgcagtctcacggcagtcagctcagcggcatggcgtctggagaaagcagcctggtccagtccccggtgtcggagctgctcgagcaggaggcccagcttgtcgctccgtacccgaccacgccacggatgccgatggtgcccgagatgtacgaggatgatgaccatgacaccgtcgttctgtctgtggctgggacgcaggtgcatgttggcgcaaccgacgaagtcgctccgcttccgcccgatccccacgatgcccatcacccgggctcgtccttcgatgactggagagacgccatcccgcacgacagggtcattacgcgccaggaagcccggcggtatcgtgaccgtgccggttcatggagagacaagaccattagcgatccccgggtcgggctcagctgggaggtcgccctcggctccatctcgggcacgagggatgcttcgagtccaccgtcgagggctcgcttgacaaaccggagcgaagcggagatgaagctgaacgagatcaagaagggagcacccccgtcgcccaagcagagaggaagtttcagctctcagacaatgttccgacccaatacactcttgggaaggaacagttggtcgttgccgcaggctcagaaggcatccgattcggaggtcgcgcaagttccgcccaaggacttctcaggcggcagcaagcagacctcgtcgtcatcgtcgtcgtcgcccaggagctggaccgaggcaaccctcaagttgctcaagaagacagtccttccctcaaacaaacgaaccgagaaagggcctcaggctcagcaacaacagcagccccagcaccccgaggttccgcctgaagaagaagacatgattcccccgaccgccatcttccgtggcagccgctcggccaattcgagtccggcagggattgcctctcccttcccgccgccgtctttctccggcatccccacagccgatcttctcgcacgaccggaaccgggcgtcccccttgtcgtccgccgctgggatacggttgtctatccccccgacggcacaccggtcacctcggccggcgtcgaatggtccagcagtgcggacccgatgtctctctcgtacccgagcattctcccgagtcggcaccagcagctcaacgctcgccctcaggttctccttcgcggaaacggcggcggcccgcccacgggatactcctcccagcccatgtcgcgcgacggctcgcagcagtccaacctcggcattggcgtccacattcccgcggcggcagcagcaatccagtctccggtgtcgcgctcctcgcgctttgcgtacaccggccaacagcgcccgccctccttcaccgagacggagccctcgcccagaatggacacggctttctccgacatcgacacctcctaccaccggtgggagcagcaccattaccagtttcaaaatcgcgccgggacctcccctgccatgagtaccgtgagctcaccggcggcggcgagcagcagcgccgccagcagcaggacggggaaggagagcagaggctcgcgctggcggcccagcagcaggcgcacgcgcttcctgcctatccggggcgcgaggccgggccgcgggagcggaaaggccaagggggggagcagtagcagaagggcgcactcgcactcgccgccg

SEQ ID NO: 516 - protein, 1444 aa, Myceliophthora thermophilia
MASVLRASYQASINKHPSRFELTAVYQHPQAKADIVLVHGLNGAPDKTWTAPNGVYWPTDLLPASLKDQHANVLVYGYNADVYGAFWERHAKNPSDNFIHHHAQTLVATLTHYRKSVGTERNPIIWVAHSLGGIVTKRALLYSNDVRDPNQEDLRSIYVSTFGIIFLGTPHNGSDAATWGGIIQRMADAVVPRKIFDTESVLLKSLKKDNETLQEISNHFLDIYQKFKIHMAHENQKTDVKGSKMLVVDASSASPQLVGVTYYGIEATHSRMCKFDSENAPGYRTVSTAIREWVADAPNVIPIRWEVEEDQRRVRANLENFERSRQYHSPALVPVDRPQTIAHGGSETVSSHLQQPPPLDEGRSVSAPLLTEATKEAPSSLRPSSHSPKLLPAIPDAPGGLPDPDHEPLFIHPETFRPNSYFVGREDELRGLHEMLMDRKRRSEGTSAVLIQCLPGGGKTHLARQYVFQHRSDYPGGVYWVRADSRQELEYWFWRIARNEALRGLVDRKDVDELRDPKKIVQIVRRWLNSQSDWLMVLDGVQFDTPGLHEFIPDARNTSLIYTSTERAVTGDPRFDNPQVMELGLLTAQQAQDLLLLELERKRPWSAEDQAMALELVGLMGRLPLMIHVAAQHLKATREPLARYLRSYRSRPKAGDLPAYKAVREQLENRGEYAALNLMSLLVFFDQHIPVEMLALGLSALDKVTPVKTLDAMHRKASLNNTLKVLIAFALIERSESDDISPTSSRSSKRSFDRHADYLDLLRIHSVVQAFFIDSLYEQRQIPFWLERAVAVWARSYDEADRRIQEDPRVGLPDDYRRFCIHGEKLLKNLNRFEKRYPKLSVARSPLEERLKKIQGQIDDLSHAIQKNIVDGSAEEYPASVFDRISASSQSDVATMQSHGSQLSGMASGESSLVQSPVSELLEQEAQLVAPYPTTPRMPMVPEMYEDDDHDTVVLSVAGTQVHVGATDEVAPLPPDPHDAHHPGSSFDDWRDAIPHDRVITRQEARRYRDRAGSWRDKTISDPRVGLSWEVALGSISGTRDASSPPSRARLTNRSEAEMKLNEIKKGAPPSPKQRGSFSSQTMFRPNTLLGRNSWSLPQAQKASDSEVAQVPPKDFSGGSKQTSSSSSSSPRSWTEATLKLLKKTVLPSNKRTEKGPQAQQQQQPQHPEVPPEEEDMIPPTAIFRGSRSANSSPAGIASPFPPPSFSGIPTADLLARPEPGVPLVVRRWDTVVYPPDGTPVTSAGVEWSSSADPMSLSYPSILPSRHQQLNARPQVLLRGNGGGPPTGYSSQPMSRDGSQQSNLGIGVHIPAAAAAIQSPVSRSSRFAYTGQQRPPSFTETEPSPRMDTAFSDIDTSYHRWEQHHYQFQNRAGTSPAMSTVSSPAAASSSAASSRTGKESRGSRWRPSSRRTRFLPIRGARPGRGSGKAKGGSSSRRAHSHSPP

SEQ ID NO: 517 - DNA, 2130 bp, Myceliophthora thermophilia
  CDS (1)...(2130)
atgaaaggcgctattgttcaggaatcatctcatgcttcgcagcctcgggcccatccgctaggtcctcttacggcacaggagattactcagactgcggcacttattcgtgcatgttggccggacaacatcgattgccacttcaaggtcgtgactctgctcgaacctcccaaagctcaactggccccctatctggctgcggaacgagaagggcaggatccgggcagcatagaccggcgggcattcgtggtctactatctcaggggaacacacaacctccacgaggcggtggtgaacatcaccacaggcagggtcgaagccaatgccaaactaggcccgtttacgcatccaaacggagacggagaggagatcatcgcggtagaaaaggcgttgctcgcgcacccagaggttcaagcggaattagccaaacttcaactccctcccgggacggtggtggtgtcggatccgtggctctatggtgccgatggtgtcaaggagggcaagttctacgacgacaagcgagtcatgcagtgtttcttgtacatgcgggatccgcagaacccgtccgagccggacagctgccattacgcctttcctcttcccttctcccccgtcatggaccccatcacgctggaattggtccgcatcgactatctacccacggggcacgatgagaaggtgaagcccccggctccgtggcagccggcaccgcctagcgagtacatccccgaggctcaaacgctgcgcaaggacctcaagccgctgcgtgtcacgcaaccagaagcagcgtccttctcggtcgagcacttctcggagctgggccgcctgatccgttggcagaagtgggacttcaaggtcggcttcaatcagcgggagggcatggtcctctacgacgtgcactacgacaacaagcccctgttctaccggctcagcctgtccgacatgtgcatcccttacgccgacccgcggaacccgttccatcgcaaggcggcgttcgacctcggagacgttggggccggcatcatggccaacaacctgcaactgggttgcgactgcctgggcagtatttactacatcgacggagtgctggtcaacggcaagggagagcctatccgcatgcccaacgtgatatgcgtccatgagcaggatgcgggcatcctgtggaagcacaccaactaccgaacgaaccgggccgtcgtggtccgaaaccgcgagttggtgctgcagaccatcctgacggtgagcaactacgagtacatactctctttcgtcttcaacacggcgggggatctcgcctatgaggcgcgggccacggggatcttgtcgacgcagcctgtcgaccgcgacctaaccgcaacgccgcatccgttcggcaccgtcgtgcacccgggagtgctcggcggattccatcagcacttcttcagcctccggatcgaccccatgattgccgggcacggcaactcgattgtgtacgacgaggcggtgccaatcccgcgcgacccaaagctcaacccgcacggcgtgggatacacggtgcagcggaccgaggtggaaacgtcgggcggcttcgacctggacactaccaagaaccgcaccttcaagatcattaacccggccgtgcacaacccggtcaacggggcggcggtcgggtacaaggtcgtggtcccacccatgcagcccatcctggccgacagggacagcttccattacaggcgcgccgagttcaccgaccacagcatctacgtcacccgctacgcggacggggagctctacgccggcggcctctacaccaaccagagccgcggcgggaacggcgtgcgcagctgggccgaccgcaaggacagcctcaagggaggcgacccggtgctctgggtccagttcggcatcaaccacatcccgcgcgtcgaggacttccccgtcatgcccgcggagacgctgcgggtcacgttgaggccggtcaacttcttcgaccggaacccggccatcgacgtgccgcccagcaggcaagaggtgaaccgaagcgtgagtctgaacgagccgggggacgacgtacaagagaatatgaacgggctgtccctgggaggcgagggtgggagcctgggttcttgttgcgcctctcacgggagcgtttga

SEQ ID NO: 518 - protein, 709 aa, Myceliophthora thermophilia
MKGAIVQESSHASQPRAHPLGPLTAQEITQTAALIRACWPDNIDCHFKVVTLLEPPKAQLAPYLAAEREGQDPGSIDRRAFVVYYLRGTHNLHEAVVNITTGRVEANAKLGPFTHPNGDGEEIIAVEKALLAHPEVQAELAKLQLPPGTVVVSDPWLYGADGVKEGKFYDDKRVMQCFLYMRDPQNPSEPDSCHYAFPLPFSPVMDPITLELVRIDYLPTGHDEKVKPPAPWQPAPPSEYIPEAQTLRKDLKPLRVTQPEAASFSVEHFSELGRLIRWQKWDFKVGFNQREGMVLYDVHYDNKPLFYRLSLSDMCIPYADPRNPFHRKAAFDLGDVGAGIMANNLQLGCDCLGSIYYIDGVLVNGKGEPIRMPNVICVHEQDAGILWKHTNYRTNRAVVVRNRELVLQTILTVSNYEYILSFVFNTAGDLAYEARATGILSTQPVDRDLTATPHPFGTVVHPGVLGGFHQHFFSLRIDPMIAGHGNSIVYDEAVPIPRDPKLNPHGVGYTVQRTEVETSGGFDLDTTKNRTFKIINPAVHNPVNGAAVGYKVVVPPMQPILADRDSFHYRRAEFTDHSIYVTRYADGELYAGGLYTNQSRGGNGVRSWADRKDSLKGGDPVLWVQFGINHIPRVEDFPVMPAETLRVTLRPVNFFDRNPAIDVPPSRQEVNRSVSLNEPGDDVQENMNGLSLGGEGGSLGSCCASHGSV

SEQ ID NO: 519 - DNA, 765 bp, Myceliophthora thermophilia
  CDS (1)...(765)
atgaccttcaacggcaccgtctccaggccgaccatcatcgccgactggggcgacgatgtcaccatccatgtgaccaacaacatggcgtccaacggcacgagcatccactggcacgtggccaggctgggcgcagcgcccgtcatgcagaacggcctgatcaacggcaccaactcgtacaactgcaccggcgagagcgacaagtacctgttccggctcatcaacgttgccgtcgacggcgtgttcgagttcagcatcgacgggcacggcctgcaggtagtggaccacgatctcgtgcccatcgtgccctacaagaccgacagcgtccagctgaccatcgggcagcggtacgacgtgatcagcgaggccaacgcggagccgggaagctactggctgcggtccggctggaacacagactcaccgccgaccgagtcggagagcaccgtcacactgtcggattcttgcctcgacgagccgccggccaagaccgtgccccatctctcactggacgtaaccaacatgtgcggaggcgtggtgtacgagaacatgaactccacgctcgccatcgccttccgcctggacagcccgggcgcctggctcgtccactgccacatcgtctggcacgccagccaggccctggcgctcgagttcgtcgagagccagtcgcgcatcccgccagacgaccgcagtacctggatgtaccgcaagacgtgcgactcctgggtggcctggacgcccatctgggaccaggaggaatctgggatatga

SEQ ID NO: 520 - protein, 254 aa, Myceliophthora thermophilia
MTFNGTVSRPTIIADWGDDVTIHVTNNMASNGTSIHWHVARLGAAPVMQNGLINGTNSYNCTGESDKYLFRLINVAVDGVFEFSIDGHGLQVVDHDLVPIVPYKTDSVQLTIGQRYDVISEANAEPGSYWLRSGWNTDSPPTESESTVTLSDSCLDEPPAKTVPHLSLDVTNMCGGVVYENMNSTLAIAFRLDSPGAWLVHCHIVWHASQALALEFVESQSRIPPDDRSTWMYRKTCDSWVAWTPIWDQEESGI

SEQ ID NO: 521 - DNA, 966 bp, Myceliophthora thermophilia
  CDS (1)...(966)
atgaaaatcgaagaacaagccgcggccaacgacgaactgacgcgctgggacttttggttcaagcattcggacgacccggccgaggagctggcccgcttcaacatcacgctggtcaaggaccttccaggcgtgggcgagaacctgggcgataactacgagggttccctgctcgccctgggcgccgccccaatcgactcgggcctcatcaccctgctcctacgcacaccctcggccccgaccgccaggcgtaacatcttcgcctggtgcggcgccttctcctttgagggcttctggccccggtttccccacctaccacggcccgacccatcccaggccggctctgtccgtctcgtctcggccgacccgcaggatcgacccgaaatcaacttccgcttcttccgcgaccgcggcgacgaggaccctgaaggagctgctacacccctgcccggacaaaagtgctccgacgagtcccaggccgagtatatcaagctccaggcctactcgcaccacgcgacatcgacctgggccatcggcgccgacgacgacctcatggccgtgctcgatcacaaattccgcgtccggggtgtcgaaggcctccgcgtcgtcgacgcgagcgccttccccgccgtccctggcgcgttcccgagctgcccgactatggtgctcagtgccaaagccgctgaggtcatcctggcggatgcctccgagaggctccggagacgagaactcgctcacatcttggccttcatctccctcacccaccgctcgtcaataatcatctcctccctcctaccgccgccagccgctgccgcaggcctctcttctcctcctccgctcagcctccgctgcttcgtggtcccgccgccacgtcgctcgctctacgggcaggaactcggagacagcatcggcccactcagcaactttggctctgaccacgacgtggcctcattccaacttgttctctag

SEQ ID NO: 522 - protein, 321 aa, Myceliophthora thermophilia
MKIEEQAAANDELTRWDFWFKHSDDPAEELARFNITLVKDLPGVGENLGDNYEGSLLALGAAPIDSGLITLLLRTPSAPTARRNIFAWCGAFSFEGFWPRFPHLPRPDPSQAGSVRLVSADPQDRPEINFRFFRDRGDEDPEGAATPLPGQKCSDESQAEYIKLQAYSHHATSTWAIGADDDLMAVLDHKFRVRGVEGLRVVDASAFPAVPGAFPSCPTMVLSAKAAEVILADASERLRRRELAHILAFISLTHRSSIIISSLLPPPAAAAGLSSPPPLSLRCFVVPPPRRSLYGQELGDSIGPLSNFGSDHDVASFQLVL

SEQ ID NO: 523 - DNA, 1251 bp, Myceliophthora thermophilia
  CDS (1)...(1251)
atggcccgcctttcagcgcttattgccagtactgccgtctttctcgccttcaacatgctcgcagccccatttggtctgtcgcgcgggccacggctgccggaaaaggctttgcgctgcaaccgagtgttctttggtgatgtgctccctccagatgcgacccttgagaaggtcgcggtggtccgggagggcgggagctacggcgagggcgaggcaaacgtggcatactcggtagacccgaccggtcttccagcattgtgtgtcattaccgttcgggtgaggagctcttcgacgagcagctaccggcttggcctctttctgccagataagtggaactcgaggtttctggtggtaggaaacgggggcttcgcgggtggcatcaactggttggacatcctgtacaactttcccgtaaccgaccccaaacacctctccgttgccgacaccgcccttatcgcagacgaagtcatccggcaatgcgacctggccgacggcgtgcaggatggcattgtcagcaccccggatcggtgcgccccggagctgactgttctcctctgcagcggcaaagacaacggggccaagaacgccccaacgtccgggaaggcagattgtctccgcccggctcagctcgagaccgcccgaaacgtctacagcgactggacccttccgcccaacaacgagctccttcatccgggtctgaccttctcctcggagggagaatggttgctcatcctcaacggctccgagccggtgccctacgggatcggatacgcgcgcgacttcctgttcgacgacgacggcggcggcggcggcggcggcagcggcagcgatgccccgccgtgggactggcgcacgtccttcaacgagagcgtcgtgcgctacgccgacgagcacgaccccgggaacgcgacggcggacgactgcgccgcgctgggggccgtccgagagaggggcggaaaggtggtgatctaccacgggctcgcggacgggctggtgccgacaaaggggaccggcgtgtactggaatcggacgttggatgccctgggcggcctgggcggcctgggcggcctggaggacttcatgaggctgtttctcgcgggcctgatagggagcggggtgtggtcggtgccggggttcgaggatgcggagcatgacgccttgatggcgttggtcgactgggtcgagaaagggaagcccttggacagcattgtcgcgacaacgtgggaagacccgacaaattcaagttcgggataa

SEQ ID NO: 524 - protein, 416 aa, Myceliophthora thermophilia
MARLSALIASTAVFLAFNMLAAPFGLSRGPRLPEKALRCNRVFFGDVLPPDATLEKVAVVREGGSYGEGEANVAYSVDPTGLPALCVITVRVRSSSTSSYRLGLFLPDKWNSRFLVVGNGGFAGGINWLDILYNFPVTDPKHLSVADTALIADEVIRQCDLADGVQDGIVSTPDRCAPELTVLLCSGKDNGAKNAPTSGKADCLRPAQLETARNVYSDWTLPPNNELLHPGLTFSSEGEWLLILNGSEPVPYGIGYARDFLFDDDGGGGGGGSGSDAPPWDWRTSFNESVVRYADEHDPGNATADDCAALGAVRERGGKVVIYHGLADGLVPTKGTGVYWNRTLDALGGLGGLGGLEDFMRLFLAGLIGSGVWSVPGFEDAEHDALMALVDWVEKGKPLDSIVATTWEDPTNSSSG

SEQ ID NO: 525 - DNA, 1779 bp, Myceliophthora thermophilia
  CDS (1)...(1779)
atggcgtccgtggacctagaccagccgtttgactacattgtggtcggcggcggcactgccggcctcgttgtcgccaaccgtctctctgaggacagcaatgtccgcgttctcgtcgtcgaagccggcgccgaccgcaacgccgatcccttggtcctgacaccaggccttgtggccggcctctacggaaaggacgagtatgactggaacttcagctcgcccccgcagccaaccctgaacaaccgacgtatcaaccaggctcggggcaagatgctcggtgggacctccggtctcaacttcatgatgctgctctacccatccaagggcaacatcgactcttgggccgccctgggcaatccgagctggaactatgacgcgctggccccctacctgcgcaagtttgccactgtccacccgtcgcctcagtccgcccgagacttgcttggcctgacctacatcgacgagagcttggcggcgggcgacggtcctattcaggtttcgcacacggatgggcacaatgtgacgaacaaggcttggctggagacatttgctagccttggcctcgaggtctcgaccgatccccgcgacgggaaggcgctgggagccttccagaaccacgcctccatcgatccagctacgcacacgaggagctttgccggccccgcgtactacacccccgacgtggccaagcggccaaatctcgtcgtgctcaccgagaccttggtcgcccgggtcctctttgacacggccggcggcgagggggacgcggtcgcgactggtgtcgagatcatcaccaaggatggccagaagaagcaggtctcggcctgcggcgaagtcatcctggccgcgggtgcgctccagagcccgcagattctcgagctctcgggcgtcggcggccgcgagctgctcgagaagcacaacatccccgtcgtcgtagataatcccaacgtgggcgagcacgtgcaggatcaccccatcgtctgccagagcttcgaggtcgccgacggcgtgccctcgggcgacgtcctgcgcgatcccaacgtcctccaggccgtcgtaggcatgtaccagtcgggcggcggcgccgggccgctgggccagagcgtcatcagcgtcgcttacaccccgctcgtcgacggctctggcgtcgtctcggccgaggccaaggccgaactgctcgcccggcacgagtcgagcttttccacggccgaaggcaaggtccttcgcgacctggtcgaatccccctccgaatgccaccttcgaattcctacctcttaccccaggcaccagaattacatcagcgtcatgaccttcatccaccagcccttctcccgcggcaaggtccacatcaccagcccggacatcagggcggcgccgctctgggacccgcggtacaactcggacccgctcgacctggagctgctggcgcgcggcgtgcagttcgtcgagcgcatcgtcgactcggccaccccgttcggccgggtcctgaagcagggcggcaagcgccagccgccgctgcgggccgacgacctcgagaccgcgcgcgagattgtgcgccagcgccagatctcggtcttccacgtctcgggcagctgcacgatgcgcccgcgcgaccagggcggcgtggtcgacgagcgcctgcgcgtgtacggcacccgggggctgcgggtcgtcgacgctagcgtgttccccatcgagccggtaggcaatatccagagcgtcgtgtatgccgttgcggagcgagctgcggatctgatcaaggaggaccgcgcgaaggcgtag

SEQ ID NO: 526 - protein, 592 aa, Myceliophthora thermophilia
MASVDLDQPFDYIVVGGGTAGLVVANRLSEDSNVRVLVVEAGADRNADPLVLTPGLVAGLYGKDEYDWNFSSPPQPTLNNRRINQARGKMLGGTSGLNFMMLLYPSKGNIDSWAALGNPSWNYDALAPYLRKFATVHPSPQSARDLLGLTYIDESLAAGDGPIQVSHTDGHNVTNKAWLETFASLGLEVSTDPRDGKALGAFQNHASIDPATHTRSFAGPAYYTPDVAKRPNLVVLTETLVARVLFDTAGGEGDAVATGVEIITKDGQKKQVSACGEVILAAGALQSPQILELSGVGGRELLEKHNIPVVVDNPNVGEHVQDHPIVCQSFEVADGVPSGDVLRDPNVLQAVVGMYQSGGGAGPLGQSVISVAYTPLVDGSGVVSAEAKAELLARHESSFSTAEGKVLRDLVESPSECHLRIPTSYPRHQNYISVMTFIHQPFSRGKVHITSPDIRAAPLWDPRYNSDPLDLELLARGVQFVERIVDSATPFGRVLKQGGKRQPPLRADDLETAREIVRQRQISVFHVSGSCTMRPRDQGGVVDERLRVYGTRGLRVVDASVFPIEPVGNIQSVVYAVAERAADLIKEDRAKA

SEQ ID NO: 527 - DNA, 618 bp, Myceliophthora thermophilia
  CDS (1)...(618)
atggttgtttactcagcggcgaggctatgcaccatcgcgagcatcacgggtccaggcagcgaatcaccaccccggatgcccggtccaggggggagccgcaccgaccaggtgggagaccgggcgtacacgtacgagaacctgcgcaagtactacgagcacagcttcaactttggcggtgagatctcgagcgcccggctaagcaacaccacgccctcgttcgaccgggccgacgttggcacgggcggccaggtccccatcagcttccccctcttcgcccagagctggagcacgtgggcggccaagggctttgaggcagtcggcatcaagcccatcaccgccctgctgcacggcgagctgctcggctcgacctggcagatcgatttgatcgactccagcacaaaaatggaggctgccatcgcccagttcaacgaggaccgcaccggccccctggcgagcccgggaggcgacttttacgccggcgagagactgccggcgcagctgaagtcccggctctccagcgagaccaagagaccaagaaaggttggcccttctgtccaggctacagtttacgtgctggccgagaagatcgcagacgataatatcaagaatgggaactaa

SEQ ID NO: 528 - protein, 205 aa, Myceliophthora thermophilia
MVVYSAARLCTIASITGPGSESPPRMPGPGGSRTDQVGDRAYTYENLRKYYEHSFNFGGEISSARLSNTTPSFDRADVGTGGQVPISFPLFAQSWSTWAAKGFEAVGIKPITALLHGELLGSTWQIDLIDSSTKMEAAIAQFNEDRTGPLASPGGDFYAGERLPAQLKSRLSSETKRPRKVGPSVQATVYVLAEKIADDNIKNGN

SEQ ID NO: 529 - DNA, 1152 bp, Myceliophthora thermophilia
  CDS (1)...(1152)
atggttctgtcaaaagtctggggagcgaccctcctcgctggttttgcggtcgcccaaacgtaccctccagatgtggttgatcagctggcgaaggatagtttgcccaagctcaaagaatggctcgagaggaacccacaggagggatgtacctacgagacggcagtcaagcggcgggaatggagggacttgaccgtcgaggaacgcaaggcatacacggatgccgtcctctgcctccagtcgaagcctgccttgacaagtgaccaagcgccgggagccaagagcaggtttgacgattatgtcgtcatccatatccaacaaacaccgaggaaccatggctcgaccttcttcctcccgtggcatcggtactacgtctggcactacgagaacgcgctgagaaccgagtgcggctacaaaggatatcagccgtactggaactgggatcgatatgctaaagaccccgccaactcgccgctcttcgacggcagcgagggcagcatgggtagcaacggtgccaaggaagaacaccagggcattcctatccccggtgcgccgcctccgtacaacatgatcccgcccggggacggcggtggctgcgtgacctcgggcccctttaagaacatgaccgtcaacgtcggcccaatcgcgccgacgctgaacgtgcagcgcaacccgcgggcggacgggctggggtacaacccacggtgcctgcggcgcgacatcaacaagcactccgcggcggtgacgacggccaactacacgtacgacctcatcaccaacaaccacgagatctactggttccagacggtcatggagggccagttcccgcaaggcaagtggggagtgcacgcgggagggcactacaccgtctcgggcgaccccgcaggcgacttctacgtcagccccggcgaccccgtcttctggctgcaccacgccatgatcgaccgcgtctggtggatctggcagctccaggacctcgacagccgcctgacccaggtgagcatgaccaagaccatgaacaacttcccccccagcgagaacggcaccctcgacgacctcagcggcctcggcgtgctcgccccggacgtcaccgtccgggagctcatgaacaccatgggagggatcggcggtaagttttgctacatctacgagtaa

SEQ ID NO: 530 - protein, 383 aa, Myceliophthora thermophilia
MVLSKVWGATLLAGFAVAQTYPPDVVDQLAKDSLPKLKEWLERNPQEGCTYETAVKRREWRDLTVEERKAYTDAVLCLQSKPALTSDQAPGAKSRFDDYVVIHIQQTPRNHGSTFFLPWHRYYVWHYENALRTECGYKGYQPYWNWDRYAKDPANSPLFDGSEGSMGSNGAKEEHQGIPIPGAPPPYNMIPPGDGGGCVTSGPFKNMTVNVGPIAPTLNVQRNPRADGLGYNPRCLRRDINKHSAAVTTANYTYDLITNNHEIYWFQTVMEGQFPQGKWGVHAGGHYTVSGDPAGDFYVSPGDPVFWLHHAMIDRVWWIWQLQDLDSRLTQVSMTKTMNNFPPSENGTLDDLSGLGVLAPDVTVRELMNTMGGIGGKFCYIYE

SEQ ID NO: 531 - DNA, 612 bp, Myceliophthora thermophilia
  CDS (1)...(612)
atggcaccggagcaccattcgcagcttggtgcacaataccataccatgaacatcaagtctcaggatgccactcaacaccctgctccgacatctaccccgagaaccacctcatttcccctatctacgtggtcgactcccaagaaccatccaactaccctccgcttaggagcaaccaagcctgagcaacatccccccaagacactgccgtactacgcaagatcccggggtattaaccagccacccgaacgcttggtgaagaagcaagagtcggccatgtgctactaccagcgcatctggtggggctgcggttgctacttcggcgtgatcctgctccgccgctgcgagcaccgcaacacgccgcgctgccagcgccgccacctgctggaccgctggcacctggccacctactgcccgcaccaccgcgacccgccgctccaactcacctgtagcccggacaacagtgacgacggaaacagacgacgccgtcgccaccgccgccgccgccgcagccatcgcagccaagaccagcgcccgggcagtcgtggcgccaccgccagtgcagcagagaccggcgattctggcgaaggaaacagcagcagtggcagcgagtga

SEQ ID NO: 532 - protein, 203 aa, Myceliophthora thermophilia
MAPEHHSQLGAQYHTMNIKSQDATQHPAPTSTPRTTSFPLSTWSTPKNHPTTLRLGATKPEQHPPKTLPYYARSRGINQPPERLVKKQESAMCYYQRIWWGCGCYFGVILLRRCEHRNTPRCQRRHLLDRWHLATYCPHHRDPPLQLTCSPDNSDDGNRRRRRHRRRRRSHRSQDQRPGSRGATASAAETGDSGEGNSSSGSE

SEQ ID NO: 533 - DNA, 840 bp, Myceliophthora thermophilia
  CDS (1)...(840)
atgtggcctactcccaaggttgcttacctcttgctggcagctcactcgctgctcgtcagcgggactcccgtcgacgccgaggccgtggacacggccatcctcgccaagcgccaatgcccgcagatccatatcttcggagctcgagaaacgacagcaccacccggatatggaactgccggtaccgtcgtcaacctgattctcaatgcgtacggtgactcggcaaggcagggcaccgacgcggtggcttcggcggtgaacagcttcaaccagcggtgtcccaacactcagatcgtgcttgttggctactcccagggcggtcaaatcatcgacaatgctgtttgtggtggccctgacacgggctctggaatcacgaccacgactcctcccatctcggctgcggccctgaaccagatcaaggccgtcatcgaaatgggctctccacggttcgtcgccggcttgtcctacgacgtcggtacctgcacggcacaaggttttgctgcgcgcccgcgtggctacgtctgcggctccaactcggcgtccaagatccagagctactgcgattcgaccgacccctactgctgcaccggcaacgacgccaacagccaccagcagtatggcaacaagtacggacagcaggccctggcttttgtcaaggccaggctcagcggcagcggcggaactccgacgtcgtcggccggcggctccgttccgaccggcggcaacggcggcacttgcagcccgctgtacggacagtgcggtggccagggatggacgggtcccacgtgctgctctcagggaacctgcagggcatccaaccagtggtactcccagtgcttgtaa

SEQ ID NO: 534 - protein, 279 aa, Myceliophthora thermophilia
MWPTPKVAYLLLAAHSLLVSGTPVDAEAVDTAILAKRQCPQIHIFGARETTAPPGYGTAGTVVNLILNAYGDSARQGTDAVASAVNSFNQRCPNTQIVLVGYSQGGQIIDNAVCGGPDTGSGITTTTPPISAAALNQIKAVIEMGSPRFVAGLSYDVGTCTAQGFAARPRGYVCGSNSASKIQSYCDSTDPYCCTGNDANSHQQYGNKYGQQALAFVKARLSGSGGTPTSSAGGSVPTGGNGGTCSPLYGQCGGQGWTGPTCCSQGTCRASNQWYSQCL

SEQ ID NO: 535 - DNA, 1230 bp, Myceliophthora thermophilia
  CDS (1)...(1230)
atgagggccgcactgcagctgtcggcgttggctctgctgcccgccgtgcttggggccgcgcttccatccaccaccagcgggcctcagtttgacaacgggcatccaatcgacgggaacgggaagggtgctcctcttttggggggaacaaaccggcagattgatatcgacaattccgacaatctcgggaagcagtccacagacaacggaatagtcccgaatctcaagtggcgcttctcggactccaagacaaggatcttcaggggaggatggctccgcgagcaggtcatccaggacctcccccagagccacgacatctcggccgcgcaacaacacctgtccaagggcgcaatccgcgagctccattggcaccgtgtcgccgaatggggcttcgtgtatgcggggtccgttctcatctcggcagttgacgagaacgggaagtaccaggttgagaagctcaactttggcgacatttggtacttccccaagggcgtggcgcacactgtccagggtctggaggacgagaatgaattcctccttgtattcgacgatcccgacttcgacaaggttggaaccacattcaacgttgacgactgggttgcgcacacccctcgcgatgtcgtggcgaagaacttcggtctcgatccttctgtttttgaccacgtcccgaacccgaatcccaacatcttcaacggcaccgtgagcaccaagaacgtgaccgggaacccagacgacgtgctcacgggcaacgcgtcgtttgtgtaccgaacgttccagcacgagccggaacccgttcctggaaaaggcggcgagttttacaagatcgactctaccaacttccccgccagcaagactcttgccgctacctatgtcaagctcaagcctggtggcttgagggagcttcattggcaccccaacgccgaggagtggctgtatttccaccagggaaccgcgcgcgcgaccgttttcatcggcaacgccgcagcacgtacgttcgacttcagcgccggcgacacagcagccttccctgacaactctggtcactacatcgagaacacgtccgagaccgaggatttgatttggattgagatttacaagtcggatcgcgtggccgatatctcgctgacacagtggcttgcactcacaccacccgacattgttgctcagactctccagactccactggaggttgcggaaaagctccagaaggagaagcaggtcttgcttccgtaa

SEQ ID NO: 536 - protein, 409 aa, Myceliophthora thermophilia
MRAALQLSALALLPAVLGAALPSTTSGPQFDNGHPIDGNGKGAPLLGGTNRQIDIDNSDNLGKQSTDNGIVPNLKWRFSDSKTRIFRGGWLREQVIQDLPQSHDISAAQQHLSKGAIRELHWHRVAEWGFVYAGSVLISAVDENGKYQVEKLNFGDIWYFPKGVAHTVQGLEDENEFLLVFDDPDFDKVGTTFNVDDWVAHTPRDVVAKNFGLDPSVFDHVPNPNPNIFNGTVSTKNVTGNPDDVLTGNASFVYRTFQHEPEPVPGKGGEFYKIDSTNFPASKTLAATYVKLKPGGLRELHWHPNAEEWLYFHQGTARATVFIGNAAARTFDFSAGDTAAFPDNSGHYIENTSETEDLIWIEIYKSDRVADISLTQWLALTPPDIVAQTLQTPLEVAEKLQKEKQVLLP

SEQ ID NO: 537 - DNA, 339 bp, Myceliophthora thermophilia
  CDS (1)...(339)
atgcatttctcgtccggtatcatctcgctgcttctagcacccgtggcaatcgctgctccgcaagcaattgactacggcccttgcgacatcaacggcaatgactattgcaaagagataatggacaacacggcctgcttcctcaacccaaagggagccgaagagatcttcaagtgcatctcgggtgggagaatcggagtgtgccaatgctatggctgtttagggtatactcctgttggcgaggtcatatcgaagtccagcgcatgcgaaggcgtaccaacggacacctcgcctgtcaagctgactcctccggtgacgccagccccgacaccagggccctaa

SEQ ID NO: 538 - protein, 112 aa, Myceliophthora thermophilia
MHFSSGIISLLLAPVAIAAPQAIDYGPCDINGNDYCKEIMDNTACFLNPKGAEEIFKCISGGRIGVCQCYGCLGYTPVGEVISKSSACEGVPTDTSPVKLTPPVTPAPTPGP

SEQ ID NO: 539 - DNA, 1785 bp, Myceliophthora thermophilia
  CDS (1)...(1785)
atgctttcagaaaaactcattgacagcttcacgctgttcaagttgcaatcggccatcgccgatgcgggtcttttcaatgtcgccctcgccttgctggccgtggtagcgacggctattgccgccgactacgcccacatgctctatctcaggtcgaagatgccgcccggcccctttccctggcctatcgttggcaacacgtttacgcttcccgacacgaaaccatggttgtatttcgaggagctgtctaagaagtacaacaccccattgattacattttggatcggacggaaccccactatttggatcaacgatgcctggtgcgctcacgacatcttggaaaagaaggctcagatctatacttcgcggcctcgtatggttgtctttggcgaacttggcagcggccaggcaaacctggtcaccatgaggatccggaaccagcaggagcgcgaccattggcgtattcatcgcaagctgatgcacgtcggcgtcggcgtacagtcggtccgcggttaccgagagatccagaacaacgagagcaagatcgttgcctatgacttcctccgcgagccgaaggagtacgtgaagcacctggagcggtatgcgaccagcgtcgtgtccatcattgcgtttggccggcgggtagcgagctataacgaccccatcatcaccgaggtaatcgccttgatgcagctggccgccgatttgaacgttcccggaaagtcttttccaatgcttctcgagacattccccatcctggccaagttcccgcggtttatgccttggttcaagggactcggcactcgcagccaaaaagggggccactacttcttctacaccctagcccaggaagcgattgagcagtacaaccagaaatcgccttccgagcaggcctcgatgccaacgccgtacgtcaagaccctctttgacgaggccaagaaatacaacctccctatcaatgagctctcgggtctgaccggcaacctattcggggccggtgcggacacctcctcgagcacactggtcaccttcgtcctcgcgtgctgcgcgtttcctgatgccatggagaaggcccaggccgagatcgaccgagtcattgggccgaaccggtctctgcactgggacgactcacccaggctgccctacgtcaacgcctttgtgaaggaagtcttccgctggcgcagcgtggccatcattggcggacagccgcactcgcccacgcaagatgacacgtacaatggctggctgattcccgccgggtcctgggtgcaggggaacgtgtgggcgattcaccaccacgagcgcgagttcccggacccggaccgcttctacccggacaggttcttcgaggacaacgatcaccaccgcccgtttcccggcgacagggactacatgacctttggctggggccggcgcgtgtgcagcggccaggcgctggccgagcaggggacctgggtcacggtggcgcggcttctgtggggattcaacatccgcaaggcaaaggatcccaagacaggaaagcagatcgacgtcgacatattcgccttcacgaacgggctgaatatgcggccgcagcccttcccctgcgagattgtgccgcggagtgaggagatcaaggaagcgatattgagggaaggggagcaagcattggcggatctcaagcttcacgacggcgagaccaggtaccggatgagcaccttctatcaacagcagaagaggaagctgaaggaggagcccgtgctcgatgagcacggaaacgtcaaggttgtcaaggtcaaggctgtttag

SEQ ID NO: 540 - protein, 594 aa, Myceliophthora thermophilia
MLSEKLIDSFTLFKLQSAIADAGLFNVALALLAVVATAIAADYAHMLYLRSKMPPGPFPWPIVGNTFTLPDTKPWLYFEELSKKYNTPLITFWIGRNPTIWINDAWCAHDILEKKAQIYTSRPRMVVFGELGSGQANLVTMRIRNQQERDHWRIHRKLMHVGVGVQSVRGYREIQNNESKIVAYDFLREPKEYVKHLERYATSVVSIIAFGRRVASYNDPIITEVIALMQLAADLNVPGKSFPMLLETFPILAKFPRFMPWFKGLGTRSQKGGHYFFYTLAQEAIEQYNQKSPSEQASMPTPYVKTLFDEAKKYNLPINELSGLTGNLFGAGADTSSSTLVTFVLACCAFPDAMEKAQAEIDRVIGPNRSLHWDDSPRLPYVNAFVKEVFRWRSVAIIGGQPHSPTQDDTYNGWLIPAGSWVQGNVWAIHHHEREFPDPDRFYPDRFFEDNDHHRPFPGDRDYMTFGWGRRVCSGQALAEQGTWVTVARLLWGFNIRKAKDPKTGKQIDVDIFAFTNGLNMRPQPFPCEIVPRSEEIKEAILREGEQALADLKLHDGETRYRMSTFYQQQKRKLKEEPVLDEHGNVKVVKVKAV

SEQ ID NO: 541 - DNA, 1593 bp, Myceliophthora thermophilia
  CDS (1)...(1593)
atgggaccgtttggcaaccttggggagagcctccggtctttcaccccacaggagcgccgcaacattgccctgtacatcgcggggattatggtgtacaagttcggtcttgaagcgttcaacggctcggtcatagcacttgccaccaacagatacgatcacgaagcagccatcaacggaacgcctagccgaacttttgagcgagtgaaaagatatcctactaagaatgtgctcgcctgtgccatcgttatctttggagcctgctcggctctcttactcattatcgacgcggcgaccggaggtaccttcatgcctgcagcttctcgcaccaaccaccgcgaccatggccactacggaaagtacaacacagacatcatgataccggtgtactgcgcgtgcggcatagtgtacggcatggtggagctcatccgccgggtcatcccgcgcgatattgttgggggacacatccagaagctgaagaggctggattccatggttcatatattctacgaggtatccggcacggccggggcattcacgacagggctggtcatcatcccccagctcggcaacaacatggcctttatcgtcacgcctgcctgcttcctcatcagcgccgttgcctgggttttcatcagcgatctgggcttccgccgccggaccgcacacctgcaagcaatcgaaaggccgtcctacttcaaggccgctctcagcggcctctacctctttgtcgagtcgatctgggtcggcgccaggatcctcttcacctcgcgcaagttcatctggctcgtgccgggctactcggtcgcgctctacgcccaccggttcctggaaaacaacgtggccccgcagatagcccagcgatacatgggcaactcggcctgggcgcagatcatcgtcggcggctccaacctgggcgagctgatcggcgcgttctcggtcttcctcttcaccaacgccgtgcaaacgcccatgccctggctgcgcctggacgcgctgatgctgctgatcgtctggtacataccgttctggcggcccccgccgggccgcgtcggccaggcgtggatcgccgccgccacgttcgcgcccatctcgtacggctgggcctcgggcgacgtgtcgctcgccgcctacatccaggcgtccctggcccgcatcgagtcgcagaacaagaacgtgtcggccctcggcgccgtcatggcgttcctctactccttctacatcaccacctacgccgtcgcgggaaccctcctggggagatacctcgacggcgtgtacaacagaacgggcggcaccgacgggggcggcgaggtccgcaccggcctgctcttcactgcgggcgtgcagatgacggtcatctcggcactcgtgttggcgtccacgtttgtgcccaagggctcgttcgcgttcaaccccaagatgatctcggacgagacgctcgaagacgagcacatcgaggtcgaggagcagcggccgggcccgggcccggccgaggagtacaatctaaaagacggattcaagaatgcggggagttattgcagtagcgaggatggatccgagtcgagggtggtcaagaagatcagcgagatattgtag

SEQ ID NO: 542 - protein, 530 aa, Myceliophthora thermophilia
MGPFGNLGESLRSFTPQERRNIALYIAGIMVYKFGLEAFNGSVIALATNRYDHEAAINGTPSRTFERVKRYPTKNVLACAIVIFGACSALLLIIDAATGGTFMPAASRTNHRDHGHYGKYNTDIMIPVYCACGIVYGMVELIRRVIPRDIVGGHIQKLKRLDSMVHIFYEVSGTAGAFTTGLVIIPQLGNNMAFIVTPACFLISAVAWVFISDLGFRRRTAHLQAIERPSYFKAALSGLYLFVESIWVGARILFTSRKFIWLVPGYSVALYAHRFLENNVAPQIAQRYMGNSAWAQIIVGGSNLGELIGAFSVFLFTNAVQTPMPWLRLDALMLLIVWYIPFWRPPPGRVGQAWIAAATFAPISYGWASGDVSLAAYIQASLARIESQNKNVSALGAVMAFLYSFYITTYAVAGTLLGRYLDGVYNRTGGTDGGGEVRTGLLFTAGVQMTVISALVLASTFVPKGSFAFNPKMISDETLEDEHIEVEEQRPGPGPAEEYNLKDGFKNAGSYCSSEDGSESRVVKKISEIL

SEQ ID NO: 543 - DNA, 561 bp, Myceliophthora thermophilia
  CDS (1)...(561)
atggccccttacgccgacatcaacatgcctcggctccgcacccttcttgttgccacgatcctcattcttctccaacagtctggcctggcgtatccccggacgcaccatgcatcaaaactatttgtgggcggccgcggggtcgatggggagtacgactacatcgttgatggcaaaacgacggtgctcgtggtggaatatggccagcggactcccagtgtgctccagctgagcggcatcgggccgcgcgagctcctcgagtcggcgggcatcctcacggtcgtcaacctgcccggcgtggggcaggactttcagcatcacgccatgatccaagcaggccttcggttcgccgcctacctggcccgctcgctcaccccgaccgagtaccacccggcagggacccgcgccatgctgcccagggacctcggcggcgtcgtcgaccaggagctgcgcgtctacggcgtcgatcgcattcggggagtgccgtccaagtggtcattcgccgtgttccgtgtcgtttcccttgttctctgcttcctccattttcatagatatactgcgtaa

SEQ ID NO: 544 - protein, 186 aa, Myceliophthora thermophilia
MAPYADINMPRLRTLLVATILILLQQSGLAYPRTHHASKLFVGGRGVDGEYDYIVDGKTTVLVVEYGQRTPSVLQLSGIGPRELLESAGILTVVNLPGVGQDFQHHAMIQAGLRFAAYLARSLTPTEYHPAGTRAMLPRDLGGVVDQELRVYGVDRIRGVPSKWSFAVFRVVSLVLCFLHFHRYTA

SEQ ID NO: 545 - DNA, 705 bp, Myceliophthora thermophilia
  CDS (1)...(705)
atgtcccggcccaacccgcacaccagtgagccgccgttcgaccgaggcctggagcacgtcgtgcgccccgccgtcgacggcgccatcatgcaggcccccgtctccaaccgcgaggccctccagctcatcatgcgagacggcttcctcggccgcaccccggccgagctgcgcgacaccttcgaccgcctcgtcgccaccgcccgcgaagccgtcgcccgcgaccccggctgcgactcgatgctgcccatctccctgaccgcccagttcggctacccgcgcaacacccccgtcagctgccgccgcttcctcagcctcgccagcccggacagcccggagtccccgtccgaggacgacaccttcagctccgacctgcccgaccgccacctcgcccgcaccttcggcatgatccggtcccgcggcctgctccgccacaccctcatggtcctcatgtcgggcgccgaccaggccgtcccggactgggtcgacaaggaggccctgctggaacgctggcgccgcgccaccgacgccgacgccgacgccgacgccgacgccgacggtgcgccgcccccgatctgggaccgccaacgcagcggcctcatcccgggcgcctcccacgccctcagcaacgacgaccaggccgagccgcgtgccttcctcgtccgccgcgtgctcgactacctcggcgagctcgagcagaaaccctaa

SEQ ID NO: 546 - protein, 234 aa, Myceliophthora thermophilia
MSRPNPHTSEPPFDRGLEHVVRPAVDGAIMQAPVSNREALQLIMRDGFLGRTPAELRDTFDRLVATAREAVARDPGCDSMLPISLTAQFGYPRNTPVSCRRFLSLASPDSPESPSEDDTFSSDLPDRHLARTFGMIRSRGLLRHTLMVLMSGADQAVPDWVDKEALLERWRRATDADADADADADGAPPPIWDRQRSGLIPGASHALSNDDQAEPRAFLVRRVLDYLGELEQKP

SEQ ID NO: 547 - DNA, 1944 bp, Myceliophthora thermophilia
  CDS (1)...(1944)
atgggcttcctcgccgccactcttgtgtcctgtgccgctctcgcgagcgcagcaagcatcccacgtccccatgccaagcgccaggtctcccagcttcgcgacgattatgacttcgtgatcgttggcggtggaactagcggcctcactgtagccgatcggctgacagaggcctttccagccaagaacgtccttgtcattgagtatggagacgtccactacgccccgggaaccttcgatccgccgacggactggatcacacctcagcctgatgcccccccttcctggtctttcaattccctccccaacccagacatggcaaacacaacagcgtttgtgctagccggccaagtggtgggtggaagcagtgccgtgaacggcatgttctttgaccgcgcatcccgccacgactacgatgcgtggaccgcggtcggcgggtccgggttcgaacagtccagccacaagtgggactgggaggggctgttccctttcttccagaagagcgtcacgttcacggaaccgccggccgacatcgtccagaagtatcactacacctgggacctgtctgcctacggcaatggctcaacccccatctacagcagctatccggtcttccagtgggccgaccagccgttacttaaccaggcatggcaggagatgggaatcaatccggtgaccgaatgcgccggcggcgacaaggagggtgtctgctgggttcccgcctcgcagcaccctgtcacggcgaggaggtcgcacgccgggctcggccactacgccgatgtgctcccgcgagccaattacgacctcctcgttcaacaccaggttgtcagggtagtattccccaatgggccgagccacggaccgccgcttgtcgaggcgcggtccctggccgacaaccacctgttcaacgtgactgtgaagggcgaagtcatcatctcggcgggcgctctgcacaccccgaccgtccttcaacggagcggcatcggcccggcatccttcttggacgacgccgggatccccgtgacgcttgacctgccgggcgtcggcgccaacctccaggaccactgcggtccgcccgtcacgtggaactacaccgagccctacaccggcttcttcccgctcccctccgagatggtcaacaacgcgaccttcaaagccgaagccatcaccggcttcgacgaggtcccggcccgcggcccctacacgctcgccgggggcaacaacgccatcttcgtatcgctcccacacctcacggccgactacggcgccatcaccgcaaatatccgcgccatggtcgccgacggaaccgccgcctcctatctcgcggccgacgtccgcaccatcccggggatggtggccggctacgaggcccagctcctcgtgctcgccgacctgctcgacaacccggaggcgcccagcctggagacgccgtgggcgacgagcgaggcgccgcagacgtcgtcggtcctggccttcctgctgcacccgctcagccgcggcagcgtgcggctcaacctcagcgacccgctcgcgcagcccgtgctcgactaccgctccgggtccaacccggtcgacatcgacctgcacctcgcccacgtgcgcttcctgcgcggcctgctcgacacgcccaccatgcaggcccgcggggcgctcgagacggcccccggctcggccgtggccgacagcgacgaggcgctgggggagtacgtgcgctcgcacagcacgctgtccttcatgcacccgtgctgcacggccgccatgctgcccgaggaccggggcggcgtcgtcgggccggacctcaaggtgcacggggccgagggcctgagggtcgtggacatgagcgtgatgccgctgttgccgggggcgcacctgagcgccactgcttatgcggtgggggagaaagctgcggatattatcatccaggagtggatggacaaggagcagtga

SEQ ID NO: 548 - protein, 647 aa, Myceliophthora thermophilia
MGFLAATLVSCAALASAASIPRPHAKRQVSQLRDDYDFVIVGGGTSGLTVADRLTEAFPAKNVLVIEYGDVHYAPGTFDPPTDWITPQPDAPPSWSFNSLPNPDMANTTAFVLAGQVVGGSSAVNGMFFDRASRHDYDAWTAVGGSGFEQSSHKWDWEGLFPFFQKSVTFTEPPADIVQKYHYTWDLSAYGNGSTPIYSSYPVFQWADQPLLNQAWQEMGINPVTECAGGDKEGVCWVPASQHPVTARRSHAGLGHYADVLPRANYDLLVQHQVVRVVFPNGPSHGPPLVEARSLADNHLFNVTVKGEVIISAGALHTPTVLQRSGIGPASFLDDAGIPVTLDLPGVGANLQDHCGPPVTWNYTEPYTGFFPLPSEMVNNATFKAEAITGFDEVPARGPYTLAGGNNAIFVSLPHLTADYGAITANIRAMVADGTAASYLAADVRTIPGMVAGYEAQLLVLADLLDNPEAPSLETPWATSEAPQTSSVLAFLLHPLSRGSVRLNLSDPLAQPVLDYRSGSNPVDIDLHLAHVRFLRGLLDTPTMQARGALETAPGSAVADSDEALGEYVRSHSTLSFMHPCCTAAMLPEDRGGVVGPDLKVHGAEGLRVVDMSVMPLLPGAHLSATAYAVGEKAADIIIQEWMDKEQ

SEQ ID NO: 549 - DNA, 1776 bp, Myceliophthora thermophilia
  CDS (1)...(1776)
atgactcgcctgatcccgaccgcgatcctccgcaatgtcctgcgatacctgatcccgctgtcgatcgctctgactctctacctctacctctatcccgtcttcaacacctgcgcattcccgctgccacccgacccgagcagcgcctctgtctcggccgacaccgggcgcgcagcctttgtcgagacggccaaggtgcactggcacaccgccgcgggcaccgccgaccacccgactatatttatcccttcccgcccgccggcgccgttccgtctccttgccctcggcgacccgcagctcgaaggcgacacgtctatcccgaccgactacctgggcgtcttcccgcacgcaaagagtctgttccgacatgcgaccttccgatcgaggcactcttcgctgcgacagcgcatccggcagagcttccatgacctggtcgacatagtctttgaggacaccttcaatgcgctcgagtcactgcgcaagaggatcgatttggtcggcaacgacctctacctcgcacacatctaccgcacggtgcgttggtggtcgcgcccgacgcacgtcaccgtgctgggcgacctcctgggaagccagtggatcaataacgaggagttctaccgccgcgctggccggtattggaaccgcgtgttccgcggcgccgagcgcgtgccggacgacgtcgccgcctacccggccgaggaatacgacctggcgggcaggctcggaggcgggcccttcaacgagtcgaccgcttgggtacggcgcgtcatcaacgtcgcggggaaccacgacattggctatgcgggcgacctcaacgacgagagggccgagaggttcgagcgcgcattcggcaagctcaactacgagctccgctttgagctgcccctcacgaacgcgtccctggccgggaccaactttgacgccgacccgagctcgacccgcctggtccccgagctgcgcatcatcgtgctcaacgacatgaacctcgacacccccgtcatctcgaccaagctgcaggacgacacgtacgccttcgtcaacaaggtcatcagcacatccgccgccgtcgagttcaagggccacttcaccgtcatcctcacccacatccccctgtacaagcccgtgggcgtctgcgtcgacgaccccttctttgattttcaccagcacgacggcagcctccgggagcagaaccagctgagcgtccccgccagcaagggcttcctcgagggcatcctgggtatgtcgggcgacgtcaaggcggcgggtcgcggccgcggccggccgggcatcatcctcaacgggcacgaccacgagggctgcgatacgtggcactacatcaaccagtcggtcgccgacccggagcagcggtcgtgggaggtcaagcgctggcggcaggccaagacggccggcatcgtcggccgcgacgagctccccggcgtccgggaggtgacggtccggagcatgatgggcggctttggcggcaacgccggcctgctgagcatctggttcgacgaggccagctgggagtggaggaccgagtacgcgacctgcccgctcgggacgcagcacctgtggtggctggtgcacatcttggacctgatcgtcctcgcggcgatcctgctgctcgccgtcgccgcgttcctgtcggcctccgggctaaacgtggacagggccgtgcaagagtcggccgctaaactttccacgccacagaagaagctcgcccggcccaatactcctgccaaacgctctgcgctggccaagggtggcggctcgggataa

SEQ ID NO: 550 - protein, 591 aa, Myceliophthora thermophilia
MTRLIPTAILRNVLRYLIPLSIALTLYLYLYPVFNTCAFPLPPDPSSASVSADTGRAAFVETAKVHWHTAAGTADHPTIFIPSRPPAPFRLLALGDPQLEGDTSIPTDYLGVFPHAKSLFRHATFRSRHSSLRQRIRQSFHDLVDIVFEDTFNALESLRKRIDLVGNDLYLAHIYRTVRWWSRPTHVTVLGDLLGSQWINNEEFYRRAGRYWNRVFRGAERVPDDVAAYPAEEYDLAGRLGGGPFNESTAWVRRVINVAGNHDIGYAGDLNDERAERFERAFGKLNYELRFELPLTNASLAGTNFDADPSSTRLVPELRIIVLNDMNLDTPVISTKLQDDTYAFVNKVISTSAAVEFKGHFTVILTHIPLYKPVGVCVDDPFFDFHQHDGSLREQNQLSVPASKGFLEGILGMSGDVKAAGRGRGRPGIILNGHDHEGCDTWHYINQSVADPEQRSWEVKRWRQAKTAGIVGRDELPGVREVTVRSMMGGFGGNAGLLSIWFDEASWEWRTEYATCPLGTQHLWWLVHILDLIVLAAILLLAVAAFLSASGLNVDRAVQESAAKLSTPQKKLARPNTPAKRSALAKGGGSG

SEQ ID NO: 551 - DNA, 1254 bp, Myceliophthora thermophilia
  CDS (1)...(1254)
atgaagctagtctcagcatacacgttgataggggcagcgatcggcagcgcctcccgggttccccggatcccgcgacaaggcggcggtaacaccatgatcgagtgtgccccgatcccgtcccctttcccgacctggcaagagctcccgctgcagtcgtcgatgccggaccccttcctcccgctcgcgtacaccacgcccgataacgccgcggatgtcgtggccggcaggggcaagggcagggtgcagactcccgaggagtggtaccggtgccggcagcccgagatcattcagctgctgcaggagtaccagtatggctactacccggacccctccgaggagaaggtcgaggccacgcgcagcggcaacacgctcaacatcgtcgtgacggcgggcggcaagcagggcagcttcagggcgaccatctcgctgccctccggggcttccgcgtcgaacccggcgccggtggtgatcaacattggcgggatgcagaaccagccatatctgagcgcggggatcgccgttgcgcagtttgactacaccaccgtatcgccggatagcaatgcgaagacgggggctttctggagtatctacaacgggagggacattggagtcctgacggcctgggcctggggcttccaccgtacgctggatgccatcaacctgacggtccccgagatcgacgcggcccgggtcggcgtgaccgggtgctcgcgcctgggcaaggcggcgctggcggcggggctctttgacaagcgcatcacgctcaccatgcccatgtcgtcgggcgtccagggggcggggccctaccggtactacgacatgagcgggcagggcgagaacctcgagaacagcaaacagggcgccggctggtggaccaacagcaagctgggcaccttcgtgaaccacgcccagaacctgccgtacgacgcccacaccatcgtggcggccatcgcgccgagggccgtcatcatcgaccagggcaccggcgaccccttcgtcaacagcaagggcaccgccgtcgtcgtctaccctgcggccaaggtcgtctatgactggctgggagcgggtgaaaacattggcatcagcgtgcgcgggggcgggcactgcgatctgagcggctacacggctatcctgccgtacgtccaaaagatcttctttgggaccccgacagacaaggactacaacaacctcggctcgtacggctcacccgtgtcgtccgccttcctatgggcgacggcggttcccggagcttga

SEQ ID NO: 552 - protein, 417 aa, Myceliophthora thermophilia
MKLVSAYTLIGAAIGSASRVPRIPRQGGGNTMIECAPIPSPFPTWQELPLQSSMPDPFLPLAYTTPDNAADVVAGRGKGRVQTPEEWYRCRQPEIIQLLQEYQYGYYPDPSEEKVEATRSGNTLNIVVTAGGKQGSFRATISLPSGASASNPAPVVINIGGMQNQPYLSAGIAVAQFDYTTVSPDSNAKTGAFWSIYNGRDIGVLTAWAWGFHRTLDAINLTVPEIDAARVGVTGCSRLGKAALAAGLFDKRITLTMPMSSGVQGAGPYRYYDMSGQGENLENSKQGAGWWTNSKLGTFVNHAQNLPYDAHTIVAAIAPRAVIIDQGTGDPFVNSKGTAVVVYPAAKVVYDWLGAGENIGISVRGGGHCDLSGYTAILPYVQKIFFGTPTDKDYNNLGSYGSPVSSAFLWATAVPGA

SEQ ID NO: 553 - DNA, 744 bp, Myceliophthora thermophilia
  CDS (1)...(744)
atggcagacaaactcgacagcatactcaagagctacgtcgccgatccggagctggcgcggtggtcgcggtgggccgggtcgccgatccggagctggcgcggtggtcgcgggtggtcgacgccgttcaagttcccgcccggcgaggggtggtactatggcacggggcccgactgggccgggcaggccctcgagcgcgtcaccggcgcccggctcggtcggtacatggaccagcacgtcctcggcccgctgggcctccgcgggacgaccggattcccgggggacggcggcggcggcgggttggaggagcggccggtacccttccccgccgaccggccgtgcgagagcggcggcgccgggctctactcgagcgcggcggactacgggagggtcatgcaggagctgctgcgggcgctggccggggaggaagggaccgtgagggagtggctcagggccattgtttggaactttggctcggccgccgaggtgccccggggctcgcgcatcgaccacgggttggggggcatcctggtcctggaggacgtggagggcaggaggaggaaggggaccatgtttttctcgggcatgtgcaatacacgatggtggatcgatcccgagacgggcatcggcgccatcatgcttgtcaatgtcatcccctatggcgactcagccgccctcgccttgttcaacgagctggagcgggctgtatacgggaacctcgtcccggcttggaaagcctcaaagtga

SEQ ID NO: 554 - protein, 247 aa, Myceliophthora thermophilia
MADKLDSILKSYVADPELARWSRWAGSPIRSWRGGRGWSTPFKFPPGEGWYYGTGPDWAGQALERVTGARLGRYMDQHVLGPLGLRGTTGFPGDGGGGGLEERPVPFPADRPCESGGAGLYSSAADYGRVMQELLRALAGEEGTVREWLRAIVWNFGSAAEVPRGSRIDHGLGGILVLEDVEGRRRKGTMFFSGMCNTRWWIDPETGIGAIMLVNVIPYGDSAALALFNELERAVYGNLVPAWKASK

SEQ ID NO: 555 - DNA, 3345 bp, Myceliophthora thermophilia
  CDS (1)...(3345)
atgatatcgactaactgccgggccgcagtggatgttcaagatgccttggtaccctcgggggcgctcgttatcgaccaggacaccaacaaaacaaccctagaccccggaagcacactcctccccggcccggttgccagcctggtcagtttcgctacacggtcaacatgtctcgctgttcggattaccagcgccataggggggagcgggttggatgcggccaggttcacgacgctctcgaccctcaaggtcggccgtaccatccttgacggggttctgagcagagccgggaaggacactgcccttgtccgcgccggcgcggtacaagcagacacggagactggcatagaaggtgtcattgagaagatacagaacaaggcggatctcttgatcttctggaccgcaaccggtttccaatttgccaacaccgcgctatccacattatccgagggatcccagttgtttctgtcgactctcgaccgcttctttggctctaccgactcctcgcgcgccatggccagcatcatcgccatgatccgccgagaaatcaccaatcccccgttggccgggcgaggagaaacggttggagtaagtgacctcgtcgcagcactttgcactctggcctttttgcagaggtcgtgcagatctctcctggaggaggaagaccgcaggtcccccgtggatgaggttgtatgggacatcgttgtcctcaacgacggtgtgcgggttgatatctctgataaaaagctgcggcatcggctctccaggagcctcggttcttcggaacaccgggatccgagtctcgacagtgcgccggcgcgacaacttgagcgtgatatcgtgcagtcattgccaaacaacgccaaggtgtctatcaccagagaactcgccgtctcggagaccatcacagtcgattttactggtgacgtgcgacaaatcgaggttaggcctcctcccggcatcgaactgatcgaggagaagcgcaacaataccctggcacaagctggcaaggaaaatgccaccgtgcaattcgtctttcgaaacgcgcgtcgccatgaacgaagagtctcctatcaaaagacagatggagaaatcagccacgccgtggactctgggagacaacttgaaccgccagcttcgcattaccccgtcagcaaagttgcgtctcaccaaaagtcacaccacgaaggggaaagcataaccaccgctggcccaagtgcttcgcctacatcatcacatcatatgacgacgcctcgattatgtatcgatttcgacgccgacagctccgtccaacaggagccaagtcacccaacatacgccgcgcctccatcgcagtcacgaggcagtcagccaagcttgctcactgataagaagcttccggaacttccgttagttccgacgaggagggaagagcatagctctggccccagttctggggagacaagaaagggtcctcgaaatgtgctcagaagatcaaccccaagactcaacaagaaggataacagttctgaggctgcgccgggcaaagctaagtctacatttgttgcgtccctggcagctaaattatccgggaagtcggaccgacgaccagccagtatccatcagcagtcattgtttttggacggtgaagggaggcatgaggagtttgaccatagcctttctcgcatcagttaccactcgatccaggaaagccggaggcaatcgacagtgtctctgggcgcttcaattgtcactactgacaactatcaatccacttccatgtacgctgagacggcaggcagccgggaagtgtgcgagcttgatcctgatacggaagacgagggcggacaggttgccttggaaaggaatcaccgccggtcaaaatccgatacaccaagcatccgcacgctggccacgagcaggtcggagatgtcacttttttcctgttaccagagtaccgccctcactttcactccggtcgacaagttgagtgcgctcagacagagtggtgttttgccgggcgtgttccccgagcggcatttgctcagcaacgctgctcgatacatgcgctttgcctcggcgtcttacggatcccatttcctcagagccctaggcatcggtactgagatgccgaggtcggggatcctcgacgacacacaccacgaactgcggtcctttgctcaccacaccaaatccgatcccaacgacattctcctcgcctcctttgtcgacccagaaggcggttccgatgccacgggggcgaccaatacgggcgtgcctctcgtgcactacatttcgctcgaccacgagtccaaagctgtggtcctcgcctgccgcggcacgctcgggttcgaggacgtcctggccgacatggcgtgcgaatacgatgagctgacctggcagggccgctcgtacaaagtgcacaagggcgtgcacgcctcggccaagcgcctcctccacggaggcgacggccgcgtcctgcgcacgctccaggccgccctcgaagagttccccaactacggcttgatcctcacgggccattctctcggcgctgccgtgacctccctcctaggcatcatgatctcggagccggttgacggcggtaacagcagcagcagcagcaacaacaacaacaacaacaataataatcgcacctttgtcactgccaccaccaccaccacctcctcctcctcctcctcctcctcctccttttccttctcatcatcatcatcatcatcttcttcatcatcatcttcttcttctgcttctccacgctaccatctaggcatcccaccgaaccgcccaatccaagtctacgcctacggcccgcccgcgaccgtgtgctccgccctgcgtgacgccacgcgcgggctgatcacgaccatcgtgaacggcaacgacatcgtcccgttcctctcgctcgggctcctccacgacgtgcagggcgccgcactggcgctccgggcggacggcgccgcccgcgaggcgaggcggaggatcctgaaggccatcgcccgcgcttgcctcgccagagacgaccacgacgtccggaacgagggcgacgacgagtggggttacgagctgctcggcactctgaggcgggcgatgcggagcgagaagctcgtcccgccgggggaggtgtttgtcgtggaggggacggtggcgctgcttagggccccggaaacgaccgagggaggtaaggaagggctagggcggccggcgaggaggatggtgctgcggtatgtaaaagacgtggagaggaggttcggggagatccgattcgggatggggctgttgacggaccacagcccggcgaggtacgaggcggcgctggataggttggtgcgcggtttgggagtgaaggagtga

SEQ ID NO: 556 - protein, 1114 aa, Myceliophthora thermophilia
MISTNCRAAVDVQDALVPSGALVIDQDTNKTTLDPGSTLLPGPVASLVSFATRSTCLAVRITSAIGGSGLDAARFTTLSTLKVGRTILDGVLSRAGKDTALVRAGAVQADTETGIEGVIEKIQNKADLLIFWTATGFQFANTALSTLSEGSQLFLSTLDRFFGSTDSSRAMASIIAMIRREITNPPLAGRGETVGVSDLVAALCTLAFLQRSCRSLLEEEDRRSPVDEVVWDIVVLNDGVRVDISDKKLRHRLSRSLGSSEHRDPSLDSAPARQLERDIVQSLPNNAKVSITRELAVSETITVDFTGDVRQIEVRPPPGIELIEEKRNNTLAQAGKENATVQFVFRNARRHERRVSYQKTDGEISHAVDSGRQLEPPASHYPVSKVASHQKSHHEGESITTAGPSASPTSSHHMTTPRLCIDFDADSSVQQEPSHPTYAAPPSQSRGSQPSLLTDKKLPELPLVPTRREEHSSGPSSGETRKGPRNVLRRSTPRLNKKDNSSEAAPGKAKSTFVASLAAKLSGKSDRRPASIHQQSLFLDGEGRHEEFDHSLSRISYHSIQESRRQSTVSLGASIVTTDNYQSTSMYAETAGSREVCELDPDTEDEGGQVALERNHRRSKSDTPSIRTLATSRSEMSLFSCYQSTALTFTPVDKLSALRQSGVLPGVFPERHLLSNAARYMRFASASYGSHFLRALGIGTEMPRSGILDDTHHELRSFAHHTKSDPNDILLASFVDPEGGSDATGATNTGVPLVHYISLDHESKAVVLACRGTLGFEDVLADMACEYDELTWQGRSYKVHKGVHASAKRLLHGGDGRVLRTLQAALEEFPNYGLILTGHSLGAAVTSLLGIMISEPVDGGNSSSSSNNNNNNNNNRTFVTATTTTTSSSSSSSSSFSFSSSSSSSSSSSSSSSASPRYHLGIPPNRPIQVYAYGPPATVCSALRDATRGLITTIVNGNDIVPFLSLGLLHDVQGAALALRADGAAREARRRILKAIARACLARDDHDVRNEGDDEWGYELLGTLRRAMRSEKLVPPGEVFVVEGTVALLRAPETTEGGKEGLGRPARRMVLRYVKDVERRFGEIRFGMGLLTDHSPARYEAALDRLVRGLGVKE

SEQ ID NO: 557 - DNA, 1281 bp, Myceliophthora thermophilia
  CDS (1)...(1281)
atggctccccacaccactgagggttccacggcgacagccgtggagggcacaactccggaacactggatcatgggcagaaaggagttcgaacgccgcatgccacaccacgacggcatcaaggcgctttgggaaaccaggtggcggcttccttgcagcaagtccgtctacccgttccacgacggcgcgtacgaggacttcgcccccatctttgaggagctgatcaagcgaaacatcaacgatgcctgcgtcccgtcgtacacagaggccttcctccccactgccgagcgtctcgcgtccctcgccgataagaaagccaccgccagtaccaccaccgccgcaaaggaggcttcggccctgtacctgcgtgcctgcgccgtctaccgcatcgcccggtttccgtacatcactgcgtttccggaggtgaacgacgctgtcaaatggagggcgtggcaggcgcagaaggagacatatctgaaggccggtcagctgtgggaatgtcctgtggaggaggttttggtggatcacaagcacgccaagggcaacgacaaggcccagattccggtctacgtgagggtaccgaagctggagaaggagcagaagaaaagaacaaaatgccccgtagtggtcctcatgactgggttggacgggtaccggccggacaatacggtgcggtgcgacgagtttctgcagaggggctggggctccgtggtggttgagatacccggcacggccgattgccccgccgacagcgccgaccctcaatcgcccgaccggctgtggacgagcctgctcgagtggatgggcagcgacggacggttcgacatgaagcgtgtcatggtctggggcctgagctgcggcggatattacgccatccgcatcgcccatacgcaccgggatcggctggtcgggtgcgttgcgcagggagccggctgtcactacttcttcgacaaggaatggctcgagaaggtggacgggcacgagttgacgcctgccatggctatgaagcacgggttcaagtctgtcgatgagtacaaggccaaggcccagaaaaagttctcgcttcttgagacgggcatcatccagagaccgtcgaccaggctgctgctggtcaatggtactcaggacggcctcatgcccgtcgaagactcaatgatgctgttcgagtatggcactgtcaaggaggctcgcttcttctccggcgcgctgcacatgggctatccactggccaatggatctgtgtacccctggatggaggaggtcatggcctcggtgagggactga

SEQ ID NO: 558 - protein, 426 aa, Myceliophthora thermophilia
MAPHTTEGSTATAVEGTTPEHWIMGRKEFERRMPHHDGIKALWETRWRLPCSKSVYPFHDGAYEDFAPIFEELIKRNINDACVPSYTEAFLPTAERLASLADKKATASTTTAAKEASALYLRACAVYRIARFPYITAFPEVNDAVKWRAWQAQKETYLKAGQLWECPVEEVLVDHKHAKGNDKAQIPVYVRVPKLEKEQKKRTKCPVVVLMTGLDGYRPDNTVRCDEFLQRGWGSVVVEIPGTADCPADSADPQSPDRLWTSLLEWMGSDGRFDMKRVMVWGLSCGGYYAIRIAHTHRDRLVGCVAQGAGCHYFFDKEWLEKVDGHELTPAMAMKHGFKSVDEYKAKAQKKFSLLETGIIQRPSTRLLLVNGTQDGLMPVEDSMMLFEYGTVKEARFFSGALHMGYPLANGSVYPWMEEVMASVRD

SEQ ID NO: 559 - DNA, 696 bp, Myceliophthora thermophilia
  CDS (1)...(696)
atgactacacattctgcccttcatcttgagaactggcccgtagctcacctcaggttgaggcgtcaaaacccgagcctggtcccagtccgcgccaaacctgtcttcgcggcgaatgaagtcgtccaggacccggacacggggctcgtctttacctccaactaccaactgtacaagatcaaccaggggatcaccttccgcgttgccatccccggtgacgcccagatcaacaccgcgttcgacgccgtcatccagttggtggtgcccagcgacgtcggttgggtcggcctctcctggggcggctccatgcccaacaacccgctcgtcgtcgcctggcaaaatgcgggctctgtcgttctgtctcctcgctgggctaccggccacgtcatgcccaccgagtccaccaacgcggggacgtacaggctcttccagacgggcaccaagtccaacggcacgcactggcagttcaccgccctctgccagggctgcacctcgtggacgaccagctccggcggctcccgctacctcactcccaccggcggcaaccgcctcgccttcgcctactcgcccggcaggccctccagcccgggcacctcgtcgtcctccatccccatccacgacgtgcacgggtactggaaccacgacttcgcggccgcgcgcaaccccaacttccacgagttggtccagcgcctcgtctga

SEQ ID NO: 560 - protein, 231 aa, Myceliophthora thermophilia
MTTHSALHLENWPVAHLRLRRQNPSLVPVRAKPVFAANEVVQDPDTGLVFTSNYQLYKINQGITFRVAIPGDAQINTAFDAVIQLVVPSDVGWVGLSWGGSMPNNPLVVAWQNAGSVVLSPRWATGHVMPTESTNAGTYRLFQTGTKSNGTHWQFTALCQGCTSWTTSSGGSRYLTPTGGNRLAFAYSPGRPSSPGTSSSSIPIHDVHGYWNHDFAAARNPNFHELVQRLV

SEQ ID NO: 561 - DNA, 1917 bp, Myceliophthora thermophilia
  CDS (1)...(1917)
atgtcgccgctgcccgaggagtttgacattatcgtctgcggaggtgggagttgtgggctggccaacctggaccataacctcacggttctcctgatcgaggccggagagtccaacctcaacaacccatgggtgtaccgcccggccatctacccgcgcaacatgaagctcgactccaagacggcgaccttttacgagtctcgtccgtcgaaatcgctcagcggccgaagtgccatagttcccgcagctcacgtccttggcggcggatcctctatcaacttcatgatgtacactcgcgcttccgcctcggactatgacgacttccaggcgaaagggtggacgaccaaggagctcttgcccctgatgaagaagcatgagacgtaccagcgtgcttcgcacaaccgagacatccacgggtttgacggccctatcaaggtctcgtttggcaactacgtgtacccgatcaaggacgacttcctcagggctgtcgagagccagggaatccctattgttgatgacctacaggatcttcgcaccggccatggtgctgaacaatggctgaagtggatcaaccgcgacaccggccgtcgcagcgacagcgctcatgcgtatgttcattccacccgcgccgtccattcgaacctgtacctggcctgcaataccaaggtcgacaaggtgatcatcgagaacggccgagccgttgctgtccagactgttccgaccaagcggtgtggtgaagatcctggaattcgcgtcttccgcgctcgcaagcagattgtcgtgtcggcggggacattgtcgtctcccctgattctgcagcggtccggaatcggcgacccgaacaagctccgccgcgtcggcgtcaagccaatcgtcgacctcccgggagtcggtctgaacttccaggaccactacctcacctttgccgtctaccgagccaagccgggaaccgagacgtttgacgactttgcccggggagatcccgaagtgcagaagcgcgtttttgacgagtggaatgtcaaggggaccggacccctcgccaccaacggcatcgaagccggcgtcaagatccggccgaccgaggccgagctgaagcagttccggtctggctggttcggcgaccacatgttgatgcccccgggcaacttcttcaccatgttccacttcctcgagtaccccttctcgcgcggggagacgcacatccggtcggcggacccgtacgcggcgcccgacttcgacgcgggcttcctgcgcgacgggcgcgacatggcgccgctggtgtgggggtacatcaagtcgcgcgagacggcccgccggatggacgcctacgcgggcgaggtccaggccatgcacccgcacttccccttcgactcgcccgcgcgcgcccacgacctcgacctcgacgacaccacccgctacgccctccccggcaacatcaccgcggggatccagcacggcagctggagcgcgcccctgcccccagccgacgtgcccgtgggcaccgccgcggccggcggcgccggtgcggtggtcagcagcaaccggaaggagaggcggaaggagctcgagtactcgagggaggacatcgcggccatcgaggaatgggtcaagcggcacgtcgagacgacctggcactgtctcgggacctgctccatggcgccccgggagggcaacagcatcgtcaagcacggcgtcgtggacgagcgcctgaacgtgcacggggtcaaggggctcaaggtggccgacctgagcatctgcccggacaacgtcggttgcaacacgtattcgaccgcgctcctgatcggcgagaaggccgccgtcctcgtcgccgaggaccttggctacgcgggcgaggcgctcgagatgcgcgtgcccgactatcacgcgccgggcgagaaccggctcgcatcgaggctgtga

SEQ ID NO: 562 - protein, 638 aa, Myceliophthora thermophilia
MSPLPEEFDIIVCGGGSCGLANLDHNLTVLLIEAGESNLNNPWVYRPAIYPRNMKLDSKTATFYESRPSKSLSGRSAIVPAAHVLGGGSSINFMMYTRASASDYDDFQAKGWTTKELLPLMKKHETYQRASHNRDIHGFDGPIKVSFGNYVYPIKDDFLRAVESQGIPIVDDLQDLRTGHGAEQWLKWINRDTGRRSDSAHAYVHSTRAVHSNLYLACNTKVDKVIIENGRAVAVQTVPTKRCGEDPGIRVFRARKQIVVSAGTLSSPLILQRSGIGDPNKLRRVGVKPIVDLPGVGLNFQDHYLTFAVYRAKPGTETFDDFARGDPEVQKRVFDEWNVKGTGPLATNGIEAGVKIRPTEAELKQFRSGWFGDHMLMPPGNFFTMFHFLEYPFSRGETHIRSADPYAAPDFDAGFLRDGRDMAPLVWGYIKSRETARRMDAYAGEVQAMHPHFPFDSPARAHDLDLDDTTRYALPGNITAGIQHGSWSAPLPPADVPVGTAAAGGAGAVVSSNRKERRKELEYSREDIAAIEEWVKRHVETTWHCLGTCSMAPREGNSIVKHGVVDERLNVHGVKGLKVADLSICPDNVGCNTYSTALLIGEKAAVLVAEDLGYAGEALEMRVPDYHAPGENRLASRL

SEQ ID NO: 563 - DNA, 510 bp, Myceliophthora thermophilia
  CDS (1)...(510)
atggtcgagagcaaacaaggccagcggagacgactgctacgagacgatccagttcggccactgcgatcaaatatgaaatccacctcgggcatcagcatctcgcagtttcagaccaacctcgagaacatggcgcgggacgtcgagcgggcagggggcacgccggtgatcctgacgtcgctgacgcggcgcaccttcaccaacaacggcgtgctcgacgacagcctggccgacgtgtccgaggcggcccggaaggcggcggccgccgccgcgggcgtcgccctgctcgacctcaacgccgcctcgcgcgcgtacgtccaggccatcggccagcaggccgccgaccgctacaacctcgccgacggcgaccgcacccacctcaacccccacggcgaggccgtctttgcccgcatcgtcgccgacctcgtcgtcggctggaagcgggagctcgccgaatacgtcaccccggacccggaaatgtcggacaagatcgcccggggagagtatgtctga

SEQ ID NO: 564 - protein, 169 aa, Myceliophthora thermophilia
MVESKQGQRRRLLRDDPVRPLRSNMKSTSGISISQFQTNLENMARDVERAGGTPVILTSLTRRTFTNNGVLDDSLADVSEAARKAAAAAAGVALLDLNAASRAYVQAIGQQAADRYNLADGDRTHLNPHGEAVFARIVADLVVGWKRELAEYVTPDPEMSDKIARGEYV

SEQ ID NO: 565 - DNA, 1920 bp, Myceliophthora thermophilia
  CDS (1)...(1920)
atggctaggacatctctctggctgctgctatgcgcctgtctttctcaagtctcttgggccgccacggtccggaagagcttgcgtctcacttggggcgaaggcgctccgaatggacggtcaagggagatgatcttcatcaatggccagttcccggggccgaacctcatctttgacgaggacgacgatgttgagattacagtgcacaatgacatgccccggaatgcaaccgttcactggcacgggatcgcccaaacgggcactccatggtctgatggtgtcatcggactctctcagagacccattctgccgggcgagtctttcgtctaccgcttcaaggcctctccccccggaacgcactggtaccattctcacgaacgcatgtcgctcgaggatggtctttacggggcaatttttgtcaggccaaagcaaaatctcaagggactgtggtcccaaatcagcaatgacaccaaggacatcaaggctatggagaaggccgcacgcaatccaaagctcatggtcctgtcagagtggacaagcttcacttctgaggcatggtggaaagccgtccaggaatcgggcctgttaatcttctgcgtcgatagcatcctgttgaacggccagggagaggcctactgcccgcctcacgaattcctcatcaaccagacaaatcccggccccaagatgaccagttttcccgaccagaacgtcaccgacaaaggctgcttccccttaacagcgccgggaatccagggaccatgggtacataactcgagcgacatcaccaaggttcccaaccatctccaatggggatgcatcccgtcgagcggaagcaactacacgctcgaggttgatcccgccgacgggtgggtcagcctgaatttcatcgcgacgcagtccaataagcaagtcgatttctccatcgacgagcacacaatgtggctctacgaggttgacggagcctacgtggagccgcgagagttcgtcgccgccgccatcagctcgggcgagcgcttctccgtcatggtgaagctcgacaagacccccgcccgctacaccatccgcctgcccgactcgggcgcgacccaggtcctctcgggcttcgccgagatggtgtacaagggcgccgagcacagcaccaggcagtcgatcccgtacgttacctacggcggcatgagcgcgctccccatcaccgacaccatgagctacaccccgtacgacctctcatccgacacgatgacgccgtggccgccggtcgcgccggcaccggtggcggacgaggagttcctcctggtgatgggtcgcgcggggtcctcgatcaagtacaccatgaacgccaaatacctctaccctcccgacttcaaggcggaccggcccatgctcttctacccgaacgacacgctggggacggaggacgagaacctggtgatccggaccaagaacgggtcctgggtcgacctgatcctgcaggtcgcctcgctgcccggcgacgagatggccttccagcacgtcatgcacaagcacggcagcaagacgtggaggatcggcagcggcgtggggccgtggaagtacagcagcgtggccgaggcgatcgacgcggagcccgagagcttcaacctggtcaacccgggataccgggacacctggatgaccgtctttgccaccgagccgacgggcggatactggaccgtctaccgctaccaggtgaccgatccgggcccgtggttgttccactgccactttgagctgcacatgatgggaggcatgtccatggccatcctggacggcgttgacgcgtggcccgaggtgccgcccgagtaccgattgaccaagccgtcttctaacaacccgtggaagaacatcttggagtggctccgcgacttgctcgaccgtcttaaaggaggccgccattccaaggcctga

SEQ ID NO: 566 - protein, 639 aa, Myceliophthora thermophilia
MARTSLWLLLCACLSQVSWAATVRKSLRLTWGEGAPNGRSREMIFINGQFPGPNLIFDEDDDVEITVHNDMPRNATVHWHGIAQTGTPWSDGVIGLSQRPILPGESFVYRFKASPPGTHWYHSHERMSLEDGLYGAIFVRPKQNLKGLWSQISNDTKDIKAMEKAARNPKLMVLSEWTSFTSEAWWKAVQESGLLIFCVDSILLNGQGEAYCPPHEFLINQTNPGPKMTSFPDQNVTDKGCFPLTAPGIQGPWVHNSSDITKVPNHLQWGCIPSSGSNYTLEVDPADGWVSLNFIATQSNKQVDFSIDEHTMWLYEVDGAYVEPREFVAAAISSGERFSVMVKLDKTPARYTIRLPDSGATQVLSGFAEMVYKGAEHSTRQSIPYVTYGGMSALPITDTMSYTPYDLSSDTMTPWPPVAPAPVADEEFLLVMGRAGSSIKYTMNAKYLYPPDFKADRPMLFYPNDTLGTEDENLVIRTKNGSWVDLILQVASLPGDEMAFQHVMHKHGSKTWRIGSGVGPWKYSSVAEAIDAEPESFNLVNPGYRDTWMTVFATEPTGGYWTVYRYQVTDPGPWLFHCHFELHMMGGMSMAILDGVDAWPEVPPEYRLTKPSSNNPWKNILEWLRDLLDRLKGGRHSKA

SEQ ID NO: 567 - DNA, 951 bp, Myceliophthora thermophilia
  CDS (1)...(951)
atgaggctatccctttgcaggttggcatcggcggtgctatccctgacctttgtgggcgatgctttgcctggtgcttctgcgcaggccgcgagccggaccactccgccgagcggatgtctgtcagtaggaagcggcaggcagtacagcaccatcacggaagcgataactgccttgggttctggcacttcagctgcctgcattttcatctacccgggaacctacaacgttgctgatggtgtttcgatcaagtacaagggcccgctgacactgtatgggtcaacctcggataccagcaagcagagcgccaaccaggtgacctttaccaggaacaagggttcggccgatgctgggagcctggacgcgtctgccacgttcaacatcgtgagcagcaacttccgggcgtacaacatcaactttcgtaacacatacggcacgcagggccaggccgtggccgtggccgccaacggcgacaagcaggcctactatgcgtgcggtttctacggctaccaggacacgctgtacgccaagagcggtcgccagtactactccaactgctacatcgagggcgccgtcgacttcatctttggcgccgcggctgcctggtttggcgagtgtaccgttgcctccaacggcggcgggtacatcaccgctaactctcgctccactacggctgatactacctgcttggccggcaaagtgttcctcggccgaccgtggcgcgtacttgcccgcgttatcttccaaaattccgagttgaccgacgtcgtgcaccctgagggctggaccagaatggctgcaggagctactcccgagttccgggagttccaaaacactggtgcaggatctaacacatcccagagaaagtggctcactttcccaacgactgctggtgtcactaagacccagctctggggcagtgactggaagacttggatagatactgcatggtga

SEQ ID NO: 568 - protein, 316 aa, Myceliophthora thermophilia
MRLSLCRLASAVLSLTFVGDALPGASAQAASRTTPPSGCLSVGSGRQYSTITEAITALGSGTSAACIFIYPGTYNVADGVSIKYKGPLTLYGSTSDTSKQSANQVTFTRNKGSADAGSLDASATFNIVSSNFRAYNINFRNTYGTQGQAVAVAANGDKQAYYACGFYGYQDTLYAKSGRQYYSNCYIEGAVDFIFGAAAAWFGECTVASNGGGYITANSRSTTADTTCLAGKVFLGRPWRVLARVIFQNSELTDVVHPEGWTRMAAGATPEFREFQNTGAGSNTSQRKWLTFPTTAGVTKTQLWGSDWKTWIDTAW

SEQ ID NO: 569 - DNA, 858 bp, Myceliophthora thermophilia
  CDS (1)...(858)
atgtcgggtctctcatccggcaccgcatctggcacgggctccccctcgtggacctccccatcccaaactgccgtcaacacgcccgcgactggcagcagcaccgccaactccggctccaacactccacgtagcttgaagaagatccgtatcctgatgctccacggctacacgcaatctgggcccatcttcaaaggaaaaaccaacggtctccagaagaagctcgccaagagctttgccacactggggttcgaaccagtgctgatctaccccacagcacccaacaaactcacggtcgacgacgtggtggggtgggagcggcgccagccagccatcaaggactttgagccggacacgtgggcgtggtaccgcagcgacgagctgcaggataagtacctgtacctggaggaggggatgaaccggatcgcggagacgttgcggcaggcgcgagaggaagcgaggcaggagggagacgaggacggcggggtggacggcgtgatcgggttcagccagggcgggtgcatggcggggatgctggcgtcggcgctggagccggtgcacaagccgcgggcggcggcggagcgggcgcacgagcgctggctcgagacggtgcgcgaggccaacggcgggcgcccgctcaacctggacacggtggtgggcgaggagcggagcatgggcctggcgaacaagtgcgtcgaccccgtggtcctgaaccaccccggcggccacttcgtgccgatcgaccccaagtacgtcagcgcgctcgtctcgttcatccatcagcacatccaggagaagaaggatcagaaggcgcaggcagcggatgaagacgcgggaaaggatggcgaagggttagactag

SEQ ID NO: 570 - protein, 285 aa, Myceliophthora thermophilia
MSGLSSGTASGTGSPSWTSPSQTAVNTPATGSSTANSGSNTPRSLKKIRILMLHGYTQSGPIFKGKTNGLQKKLAKSFATLGFEPVLIYPTAPNKLTVDDVVGWERRQPAIKDFEPDTWAWYRSDELQDKYLYLEEGMNRIAETLRQAREEARQEGDEDGGVDGVIGFSQGGCMAGMLASALEPVHKPRAAAERAHERWLETVREANGGRPLNLDTVVGEERSMGLANKCVDPVVLNHPGGHFVPIDPKYVSALVSFIHQHIQEKKDQKAQAADEDAGKDGEGLD

SEQ ID NO: 571 - DNA, 660 bp, Myceliophthora thermophilia
  CDS (1)...(660)
atgattacgcggtccttagcctcggtctatgacatggttaaccggttcatcaattacaagccgccgttccccggggacacaggttcgccgtctggcgctgacgcgtttctcgactttatcgagggggctctgcctccttggcttcatgacagtatattcccgaatgtagcgttcacctgcgacgccgcgcttcgaaactctttcggcggactcctggttgccttttcgctgatctcccgcccagccatgttcgacacatatctggcggcgagccctgctctggaagtaagtgcaaaacagctgcatcctggccgaggtcgcgtctcggttcggaattggcgatccgacaacatcggcctagtacacctcttctggatgcaaccaaacctcgaacatgccggcgctcatgatcacgtacggaaagccatgagcagtgtccggcccgcaggcgtaccgaaaacgaaacggcattccaggcggggaagagctaattacttccggcctcttggaatgacggaacactgccacgacctgttcgatctggtgaaagcgagtagaaaggttagcgatgttgtgctcaacgagtacgcgggacaggaccacgcgggcgttgctgcgagcgcaatcaccgagggcattgactactttgtcgactggtaa

SEQ ID NO: 572 - protein, 219 aa, Myceliophthora thermophilia
MITRSLASVYDMVNRFINYKPPFPGDTGSPSGADAFLDFIEGALPPWLHDSIFPNVAFTCDAALRNSFGGLLVAFSLISRPAMFDTYLAASPALEVSAKQLHPGRGRVSVRNWRSDNIGLVHLFWMQPNLEHAGAHDHVRKAMSSVRPAGVPKTKRHSRRGRANYFRPLGMTEHCHDLFDLVKASRKVSDVVLNEYAGQDHAGVAASAITEGIDYFVDW

SEQ ID NO: 573 - DNA, 732 bp, Myceliophthora thermophilia
  CDS (1)...(732)
gcgctcgtcggctgcatcctggccgaccggtccctgcccgtcgacgccgcccgcgtcgccgtggccggctggtccgccggcggcaacctcgtcctggccgcctccctcctgccctcgctgcgcggccgcatccgcgccgccgtgcccctctacccgctcctcgaccgtgccaccgccaccgccgtcaagacccgcacccgccggtacaagcccgccctgggcgggttccgcgcccgcgacggcgacttcgtcgcccccatgatgggcctcttcgactgggcctttctccgccccggccagcgctgcgacgaccccctggtgagtccgtgctacgccccgcgggagcacctgcccgcgggcgtgttcctgatcggctgcgagttggacatgctggcgcacgaggcctggcgcgtggcctgccggctcgcggggaggagggtcccctcgctggacgagcccgtcgggcgcgaggaggcggggggcaagggggagctggtcaccgggggcgacgagcggttcgcgtgggaggaggagacggcggaggaggacggggggttacgggtcaggtggctgctcgtgcccgacaccgtccacgggttcgaccagagcaacatcgaggggctggtcaaggatccggtcttcatggaggatgcgcgcatcaagacggtcaaggtgattgacttggtcggggagtggctgctcagcgggccattgcaggcaacgaagtcctga

SEQ ID NO: 574 - protein, 243 aa, Myceliophthora thermophilia
ALVGCILADRSLPVDAARVAVAGWSAGGNLVLAASLLPSLRGRIRAAVPLYPLLDRATATAVKTRTRRYKPALGGFRARDGDFVAPMMGLFDWAFLRPGQRCDDPLVSPCYAPREHLPAGVFLIGCELDMLAHEAWRVACRLAGRRVPSLDEPVGREEAGGKGELVTGGDERFAWEEETAEEDGGLRVRWLLVPDTVHGFDQSNIEGLVKDPVFMEDARIKTVKVIDLVGEWLLSGPLQATKS

SEQ ID NO: 575 - DNA, 942 bp, Myceliophthora thermophilia
  CDS (1)...(942)
atgaagctcctgggcaaactctcggcggcactcgccctcgcgggcagcaggctggctgccgcgcacccggtcttcgacgagctgatgcggccgacggcgccgctggtgcgcccgcgggcggccctgcagcaggtgaccaactttggcagcaacccgtccaacacgaagatgttcatctacgtgcccgacaagctggcccccaacccgcccatcatagtggccatccactactgcaccggcaccgcccaggcctactactcgggctccccttacgcccgcctcgccgaccagaagggcttcatcgtcatctacccggagtccccctacagcggcacctgttgggacgtctcgtcgcgcgccgccctgacccacaacggcggcggcgacagcaactcgatcgccaacatggtcacctacaccctcgaaaagtacaatggcgacgccagcaaggtctttgtcaccggctcctcgtccggcgccatgatgacgaacgtgatggccgccgcgtacccggaactgttcgcggcaggaatcgcctactcgggcgtgcccgccggctgcttctacagccagtccggaggcaccaacgcgtggaacagctcgtgcgccaacgggcagatcaactcgacgccccaggtgtgggccaagatggtcttcgacatgtacccggaatacgacggcccgcgccccaagatgcagatctaccacggctcggccgacggcacgctcagacccagcaactacaacgagaccatcaagcagtggtgcggcgtcttcggcttcgactacacccgccccgacaccacccaggccaactccccgcaggccggctacaccacctacacctggggcgagcagcagctcgtcggcatctacgcccagggcgtcggacacacggtccccatccgcggcagcgacgacatggccttctttggcctgtga

SEQ ID NO: 576 - protein, 313 aa, Myceliophthora thermophilia
MKLLGKLSAALALAGSRLAAAHPVFDELMRPTAPLVRPRAALQQVTNFGSNPSNTKMFIYVPDKLAPNPPIIVAIHYCTGTAQAYYSGSPYARLADQKGFIVIYPESPYSGTCWDVSSRAALTHNGGGDSNSIANMVTYTLEKYNGDASKVFVTGSSSGAMMTNVMAAAYPELFAAGIAYSGVPAGCFYSQSGGTNAWNSSCANGQINSTPQVWAKMVFDMYPEYDGPRPKMQIYHGSADGTLRPSNYNETIKQWCGVFGFDYTRPDTTQANSPQAGYTTYTWGEQQLVGIYAQGVGHTVPIRGSDDMAFFGL

SEQ ID NO: 577 - DNA, 276 bp, Myceliophthora thermophilia
  CDS (1)...(276)
gccaaccagtgctccgtccagcgcgtcgtcaacgagcagattgacggctggctcgacagcctgccgggtggcgtccagatcgtcgggccccagccgggctccggctctggcggcggaagtaaccctggcaacggtggcggcaacaacaatggcggcggctcctgccaggtcgccaagtggggccagtgtggtggacagggctacacgggctgcacgacgtgcgcggccggctcgacatgcaaggcccagaaccagtactactctcagtgcctgtag

SEQ ID NO: 578 - protein, 91 aa, Myceliophthora thermophilia
ANQCSVQRVVNEQIDGWLDSLPGGVQIVGPQPGSGSGGGSNPGNGGGNNNGGGSCQVAKWGQCGGQGYTGCTTCAAGSTCKAQNQYYSQCL

SEQ ID NO: 579 - DNA, 2049 bp, Myceliophthora thermophilia
  CDS (1)...(2049)
atgcagcttgccggattggtcctggctctcgccggcctggcggcgggcgagtccctcaaaaaacttgacaccagcctgaccatcctgaccaagaatgatctcctgggggcttccagccctgacgcggataccgccgtgattctcaccgacgcccgcccatatcagcatgtctctgacgtgtgccacaagctgggcgagcagctgtggcgacccgggaagggcactggcaagaagaacgaaagagacgctgcagctctgccgtttgcagagtacctgaaatatgacggtatggctgatgcgtcatccaagttctgggtcggtggttccggtttcgcggccgtagacctcgccggccgtcatcagaccgcggactcggtctcgcacttgcggctcccgggattgtgcgcaaacacggcaccattttcgaaccagagcgcgcaggacacgagctccaggtggcagatcagcctagaggtcaacaaccagactcttactgggtttcgcgaccgcctctctttccgctttctcggtatccgctatgccccgcagccgcagcggttcacctattctaccctgttcaaggggtctggcgaggcggcgtctgcgctctcgtacggctcgcagtgtatccaatcgggcggcggcagcgaggactgtttgttcctgaacatctggaccccctaccttcccaatcccaacactgcgccccagaagaagaagctccgtcccgtcggcgtgtggattcacggaggcgccttcaccggcggcaccgccaacgaccccacttttgacggtgccaacatggtatccagaggcgacatggtgttggtggccatcaactatcggctcttggctttcggtttcctcgccctcaaggacggcaagtcgaacggaaactacggcctggccgaccagatcaccgccctggactgggtgcgcaacaacatccatcactttggcggagacaaggaccgcatcaccgtctttggtcagtcggcgggcgctggctcggtacgggcgctgatagcctcgcccgaggccgccggcaagttctcgggcgccatcatgctgtccaatctcggtggtatcaactacgggaccacgtactctcagtactacaccatcgacgaagaagtcgatgtcgccgctaagcctatcctctccgcgaccaactgcgccaatgccgcctctcaggttgactgcctccgcgccgtcccggcatctaccctcgccacgttcggcgatgcccgctacctcgtcgtcgatggcacctatctcaagtcccgctcccttccggtgaccgggccccggctccctatcaagctgatgatgggcatcacccgcgacgacggcgcgcccttcatctcgttccccacgacgactaacgaatcagcctacctcgactcggtcggcctgccactcccctccccgaggctcttcccgattaccccgacgggcaacgccaccctcgatctctacacgacggcgtctcggatcgcgaccgacggcatctttcgatgcatagaccaagcgacggcctcttccctcctcacccacggccggctcgaccacatctacttctacgagtttgaccggacctaccagacgcagggctggccgggcatcgacgtgtgcgagccgccccgcacgccctcccacccggccggcgacccgtctaagccgtacctgcgctgccactcgggagagttgtactacgtctttggaaacctgcaccggcagggtctgccgatgcgggacgatggcgacttggcgtttgagcagagcgtcttggacagttttgcgtcgttcatccggacgggggacccgaatccggacgacgcctggttgaaggccaggggctaccagcagcagcaacaacaacaacaacaacaacaagggcggaagagagatcggtgggagccgagcaccaagcggggcgggttgaagttgagattactggattggcctgcttcaaggatgagcgggttccgcgaggagaagcagtgcgagagtctcggcttggggctgggcttttacgagggaaaataa

SEQ ID NO: 580 - protein, 682 aa, Myceliophthora thermophilia
MQLAGLVLALAGLAAGESLKKLDTSLTILTKNDLLGASSPDADTAVILTDARPYQHVSDVCHKLGEQLWRPGKGTGKKNERDAAALPFAEYLKYDGMADASSKFWVGGSGFAAVDLAGRHQTADSVSHLRLPGLCANTAPFSNQSAQDTSSRWQISLEVNNQTLTGFRDRLSFRFLGIRYAPQPQRFTYSTLFKGSGEAASALSYGSQCIQSGGGSEDCLFLNIWTPYLPNPNTAPQKKKLRPVGVWIHGGAFTGGTANDPTFDGANMVSRGDMVLVAINYRLLAFGFLALKDGKSNGNYGLADQITALDWVRNNIHHFGGDKDRITVFGQSAGAGSVRALIASPEAAGKFSGAIMLSNLGGINYGTTYSQYYTIDEEVDVAAKPILSATNCANAASQVDCLRAVPASTLATFGDARYLVVDGTYLKSRSLPVTGPRLPIKLMMGITRDDGAPFISFPTTTNESAYLDSVGLPLPSPRLFPITPTGNATLDLYTTASRIATDGIFRCIDQATASSLLTHGRLDHIYFYEFDRTYQTQGWPGIDVCEPPRTPSHPAGDPSKPYLRCHSGELYYVFGNLHRQGLPMRDDGDLAFEQSVLDSFASFIRTGDPNPDDAWLKARGYQQQQQQQQQQQGRKRDRWEPSTKRGGLKLRLLDWPASRMSGFREEKQCESLGLGLGFYEGK

SEQ ID NO: 581 - DNA, 1215 bp, Myceliophthora thermophilia
  CDS (1)...(1215)
atgaagaagacggtattgctctcttttattcacggcttcaagggggatgagtccacctttggcaagaactatgcctttgtcgagcatcttcgtaagctggtggcagccgctcttcccaaggtgaacgtccaggctgtcgtttacccgacatacaagacccgcggcgacctgggagagtgcgtgacacgcttcagcgactggctcctcaacaaggtgatagacctcgaagtagccgccgggacctcctccccgacaatcgacccctccgttcgcgttgtgttagtaggacactccatgggcggcatcgtcgcggccgaaacagccatcaggaccgcctcggagcaaccgatccacaactcggtcgacgaagacagccccactaaatcatccaccgccatgccgcctcccccgaatgcgctcatgttcccgtacatccagggtgtcctcggcttcgatacacccttcctgggaatatcccctggtgtggttgcccacggcgcggaatcgcactacgctgccgcgtcggcggccatcgcccagttaagcggactgacgagcctctggggcggcaccaaagccgccgaggccagccccgacgcgaagacggccggcgtgttgcctccggcagccccatcgccgggacccagagacggaaacaaaggcgaggagaatcagagtaaacccgcgccagcgaacagcggttggggcaagtggggcactatcgccatcgcggcgggtgccgtaggcgccgtggcagccggcgggacggcagcctacctgaagcgcgatcaaatcacacaggggctgggttgggtcacgtcgcacctcgagtttgtcgggtgcctggcgcgcaaggaggagctgaagcggcgggtagcgtacatggtgcgactgaacaaggagcttggggtcgggttcgggaacttgtacacccgattggggcaggcagcgggatcgaagcaggtgagcatggttgggacggtgctagggagcgagaggacgttctgcgtggtgccgcagcgggaccaggctggagactggcgccaggcggtgaatgacagggcgaaggatgagattggggcgcatatttccatgtttgggcccaaggaaaacccgggcttcgacaagatgtcgactgacgcaagggatatggttgcggcctggttccgcaatgattggtatgagagcagctcgacagatacggttcgctcatga

SEQ ID NO: 582 - protein, 404 aa, Myceliophthora thermophilia
MKKTVLLSFIHGFKGDESTFGKNYAFVEHLRKLVAAALPKVNVQAVVYPTYKTRGDLGECVTRFSDWLLNKVIDLEVAAGTSSPTIDPSVRVVLVGHSMGGIVAAETAIRTASEQPIHNSVDEDSPTKSSTAMPPPPNALMFPYIQGVLGFDTPFLGISPGVVAHGAESHYAAASAAIAQLSGLTSLWGGTKAAEASPDAKTAGVLPPAAPSPGPRDGNKGEENQSKPAPANSGWGKWGTIAIAAGAVGAVAAGGTAAYLKRDQITQGLGWVTSHLEFVGCLARKEELKRRVAYMVRLNKELGVGFGNLYTRLGQAAGSKQVSMVGTVLGSERTFCVVPQRDQAGDWRQAVNDRAKDEIGAHISMFGPKENPGFDKMSTDARDMVAAWFRNDWYESSSTDTVRS

SEQ ID NO: 583 - DNA, 684 bp, Myceliophthora thermophilia
  CDS (1)...(684)
atgaagacggccgccatcctcgcgaccctccccgcctcggtcgagggcgccatcctctgggacggccggttcaacgacttgaccagctcgcaggacctcaacaagtggtcgtggagcaaccaggtcgggccgtaccagtactacatccacgggtcgggcacgggagcccggttcacgctcgagagcacggccttctggaacgggcagaacatgcggcggaccgagctcgtcccgcagacgacggcgcccatcaaccggggcaagatctgcttcttcgagtgccacttcaccgagatgaagtacggctggatcagcggcgagcagggcacgagcaacgtcaacctgcagtggatgaccaaccagcagagccggtggaagacggagtggaaggctggtgtgtggcacaacattgcctacgagattgacttcaatgcgaacacggtcggcttctggcactcggagggcgccgagccgctcaagcaggtcgtcgcgcccgtccccgtctcgacctcgtccaacggggcggactggcacctgggcgtgctggagctgccccggtcgggctactcggacaccaacgaggagttttacttctcgggcgtctacatcgaggacggcaccatcaccaccgatatcagcggccctgttaccttggtgggaatactgattattgctcatgtgtag

SEQ ID NO: 584 - protein, 227 aa, Myceliophthora thermophilia
MKTAAILATLPASVEGAILWDGRFNDLTSSQDLNKWSWSNQVGPYQYYIHGSGTGARFTLESTAFWNGQNMRRTELVPQTTAPINRGKICFFECHFTEMKYGWISGEQGTSNVNLQWMTNQQSRWKTEWKAGVWHNIAYEIDFNANTVGFWHSEGAEPLKQVVAPVPVSTSSNGADWHLGVLELPRSGYSDTNEEFYFSGVYIEDGTITTDISGPVTLVGILIIAHV

SEQ ID NO: 585 - DNA, 1441 bp, Myceliophthora thermophilia
  CDS (1)...(1440)
atggcagccccagcaactgccagtcagcatccacttccggacggcagccatcaggccggcggaggagtgtcggggaaaacgcagacagtcaggaccgtcaacggggcggtcctggctcacttgcgacaagtctacgcatctcatgccggtagtgccaccgagtggagtcccgaaaagaaggcggcttttctgaaggatattcagcatgacaccgaagctgagagcgctcccgagctggccagcggcaaggcctgggacttcaacgagttcctccggtacatgacttcgtctatcacgaacgcggttgcgcccccccatgaggaagacctctcctggccgctgtcgagctactttatcagctcgagccacaacacctacctcacgggcaaccagttgtcgagtgactcgagcgccgacgcctacaaaaacgtcctcctgcgcggctgccggtgcatcgagatcgatgtgtgggacggtgacgactccgatgatgacggcgagactagtagtagtagtagtagtagcagcagtgacgacgaagagaccaaggagaagcgaaagtcgcgcttcagcaaagtgacgggcaagctgcccaaatcgctgaccagccggttcgagaagacaagcctggaagaaaaagaaaaagaaaaaccaggaaacactgcagcccccacggtggtgccgactgaggcaccaagcacgactccaccggcgaacccgctgcaaaaggtctcgagcgggaaggagccgagggtccttcacggatacacgctgaccaaggaggtgtcgttccgcgaggtgtgcgtcgccatcagggactacgccttcgctgtgaccgacacgcccttgatcgccagcctggaggtgcactgcagccacgaacagcaagagaccatggtggccatcatgcgcgagacgtggggcgacttcctcctaccggaacccaaggaggacgccaagcacctgccctcccctgccgagctgcgcggcaagatcctcgtcaaggtcaagtatgtcccgcccgatgctgaagaggaggaggaggaggcgctcccgggcgacaaccagacggccaaggccaagaaaccgtccaagatcatccaggcgctgagcaagctgggcatctacacgcgcggcgtctcgttcaagagtctgacgcagcccgaggcaacgatgccgacgcacatcttctcgctctcggagaacggcgtcatggaggtacacgagaagagcgcgcgcgagctgttcgagcacaaccgccgctacctgatgcgcgcctacccatccggcctgcgcatccgatcgtccaacctcgacccggccgtcttctggcggaagggcatccagatcgtcgcgctgaactggcagaactgggacgagggcatgatgctgaacgagggcatgtttgccggcaccagcggatacgtcctgaagcccgaag

SEQ ID NO: 586 - protein, 480 aa, Myceliophthora thermophilia
MAAPATASQHPLPDGSHQAGGGVSGKTQTVRTVNGAVLAHLRQVYASHAGSATEWSPEKKAAFLKDIQHDTEAESAPELASGKAWDFNEFLRYMTSSITNAVAPPHEEDLSWPLSSYFISSSHNTYLTGNQLSSDSSADAYKNVLLRGCRCIEIDVWDGDDSDDDGETSSSSSSSSSDDEETKEKRKSRFSKVTGKLPKSLTSRFEKTSLEEKEKEKPGNTAAPTVVPTEAPSTTPPANPLQKVSSGKEPRVLHGYTLTKEVSFREVCVAIRDYAFAVTDTPLIASLEVHCSHEQQETMVAIMRETWGDFLLPEPKEDAKHLPSPAELRGKILVKVKYVPPDAEEEEEEALPGDNQTAKAKKPSKIIQALSKLGIYTRGVSFKSLTQPEATMPTHIFSLSENGVMEVHEKSARELFEHNRRYLMRAYPSGLRIRSSNLDPAVFWRKGIQIVALNWQNWDEGMMLNEGMFAGTSGYVLKPE

SEQ ID NO: 587 - DNA, 1989 bp, Myceliophthora thermophilia
  CDS (1)...(1989)
atgactggcaatcgggccattgacatcaacggtggggaggacgaggatgaggcactgcggattgcgattgccctgtcgctggggaaggagccggagccaccttcgtcgcctcgcggtcggcccgggacggaccaggtgattgatctcacgcacgacgacgacggccacgctggcgattccggcaagggcagcgcaggggagggcgatgacgatgtcgtcatcttggccgcccacggcgatgtcggccgttctgggcctcggcagaaggacgagacggcgacggcgtcaaccgcgcagcagacgacttccgtgtccgtattctccgccctagggctggatcggaggaaaatggaggaggagcggctggcgaggctgagcaagaggaaggcatcttctcaggttggggatgacgggcagccggctgcgagaccagcgcaacggccgaggatagcggatgaagagaagggggaagtgacgtcgttggaggggaggacgtcgacagggcatggctcatcatcaccctcgtccagaccggatctaccgctgaacccgtcaaggtcatcgacatgtcccggcctccacttcccccgaggcgttgtcaaaaagacctgggcgtacggccagccccggcgaggcgacgacatcaagatcgaggaagttcttcagaagcagcacctccacctcgccgtcctgagctcttaccagtgggatgaggagtggatgctgtccaagatcgacatcgcgcggaccaagctgatccttgtggcatttgctgccgacgaagcgcagaaagaggagatgaggtccaacgtgccgcgcgacaggatccggttctgcttcccgcccatgcatggcattggctcgatgcactccaagttgatgctgctcaagtacgaaaactacctgcggattgtggtgcctacggggaacttaatgtcgtttgactggggggagaccgggactatggaaaacatggtgtttattctcgacctcccaaaatttgaaaccgcggagggacgggaggcgcagaagctcaaccggttcgccgatcagctcttctactttctccgcgctcaaggactcgatgagaagcttgtagacagcttacgcaactacgactttaccgaggccggtcgttacgaatttgtgcacacaatcccgggatctcataccggagacgatgccttgagaacaggatactgcggccttggccagtcagttaacgccctggtcggcactcgttcagagcccgtcgagctggaccttgtggtgagcccggacctgtcccagctctacgactcgcttctctgcttgacgtgcgcgtctctcggggcggtcaactacggcctgcttacgtcgctctactacgcttgcctgggcgatcctcttcgagagtacgaggagcgggcgtctgggagtcagagaaatcgtgacgcgtttacaagcagggcaatttccttggttaaggaacacatgcggatattctttccctcgcgtgagacggttctacggagcaagggaggaaaagacggcgcgggaacaatatgtctcctgtccaagtggtggcaagccccaacgtttccccgggaactcgtacgagactgcaagtcggtcaggcagggcgtgctcatgcacaccaaggccctctacgttaggccctgcagtcccacctcgcaacagtccggccgctgttttgcctacgtaggcagcgccaacctctccgagagcgcctggggccgactctccagggaccgcgcgtcgggcaagcccaagctcacatgccgcaactgggaatgcggtgtcctcctctgtactgatagaacggtggaaggaagcagcggtgcgggcagcgacaacctgggcgtatttgacgggtgcgtgccggtcccaatggagtggccaggacgggccatctctggggagggaggggaggggatggcggccaaggacaaggatgccaggacgccttggttctacgcggaagggtga

SEQ ID NO: 588 - protein, 662 aa, Myceliophthora thermophilia
MTGNRAIDINGGEDEDEALRIAIALSLGKEPEPPSSPRGRPGTDQVIDLTHDDDGHAGDSGKGSAGEGDDDVVILAAHGDVGRSGPRQKDETATASTAQQTTSVSVFSALGLDRRKMEEERLARLSKRKASSQVGDDGQPAARPAQRPRIADEEKGEVTSLEGRTSTGHGSSSPSSRPDLPLNPSRSSTCPGLHFPRGVVKKTWAYGQPRRGDDIKIEEVLQKQHLHLAVLSSYQWDEEWMLSKIDIARTKLILVAFAADEAQKEEMRSNVPRDRIRFCFPPMHGIGSMHSKLMLLKYENYLRIVVPTGNLMSFDWGETGTMENMVFILDLPKFETAEGREAQKLNRFADQLFYFLRAQGLDEKLVDSLRNYDFTEAGRYEFVHTIPGSHTGDDALRTGYCGLGQSVNALVGTRSEPVELDLVVSPDLSQLYDSLLCLTCASLGAVNYGLLTSLYYACLGDPLREYEERASGSQRNRDAFTSRAISLVKEHMRIFFPSRETVLRSKGGKDGAGTICLLSKWWQAPTFPRELVRDCKSVRQGVLMHTKALYVRPCSPTSQQSGRCFAYVGSANLSESAWGRLSRDRASGKPKLTCRNWECGVLLCTDRTVEGSSGAGSDNLGVFDGCVPVPMEWPGRAISGEGGEGMAAKDKDARTPWFYAEG

SEQ ID NO: 589 - DNA, 1920 bp, Myceliophthora thermophilia
  CDS (1)...(1920)
atgttcccgaagaggcgggaggcgggagcggcgtgcacttcggccggcctagtcaccgcccgactactgttgtccttcctcgctctcccaacatttccggttgcggctgcaggacatgccccatcggacgcgcagctccctctcgccatcgaggttggtccggtagcgccactaataccggaacccccagcacccgctgagcacaccttcacgctccgacacatttttcaccacggaacgtataaacacccgcatctccatcgcaaacaggatgtcacgcagccaaaggcggacgtgtggctgccggccgaggacggatacgaggcccaacgaatcggtcccctgcgagcccgaagcaacccgctccggatccagcgactggtggaccggaggcccagtgtggtagaccctattgtggccgagtcgaggaagcaggggtttgtctcggtactctcgccatccgcgtggacgatcgacgatgttcccgggcccaacgtcaccgacaaggacaccgttctgacgctcgccctgatggcggccgacgcttacgtggagaagccgggcgaagcggactgggaagatgtcggcgcgccgttcaaccggagtctcgatttcggctgggagggcgatgggctgcggggccacgtatttgccgacgagactaactcgaccatcgtcatcgggctgaaggggacctcggttgccgtgtttgacggggagggcacgaccacgaacgataagatcaacgataacctgttcttcagttgctgctgcgcccagcagggaccctggacttggcaacaggtgtgcgactgcgcgaccggcacctacacgtgtaataacacgtgcgtcacccaagccctccgcgacgagaaccgctattattacgcggcgcgcgagctgtacgccaatgtcaccgagatctaccccaattccaacgtctggattacaggtcattcactgggtggagctgttagctcgtttctgggcctcacgtacggtgtgccggtggtgaccttccaagcggtgcctgacgcgctgccggcgaggaggcttggtttgcccgtccctccgggagccgacccggacgcgcctcaggagagggagtacacgggcgcattccactttggacatacggctgaccccgtctacatcgggacctgcaacggagcgacggcgtcgtgctcgttagcaggttatgcgtttgaagcggcctgccacacgggccgtgaatgcgtctatgacacagtgggcgacttgggctggcgtgttggtatcggaacgcacaggatcaagtcggtgattcgggacgtcatcctgaagtatgactcggttccggagtgcaagtttactcccgagtgccgggactgcggcaactggaagatgtacgagagcaacgggacagagtcgaccatgacctcgagcgttccgacgacaacctccaagacccggactcggaccgaaacctgcaagacgccgggttggtggggttgcttggacgagaccacgacaactactggtacggagacgtctgaggtcacgacatcgacatcatcgaccacaacatgccataccccgggctggtttggctgcaaggacaagaccacgactagtgtaaccaccaccgaaaccatcacttcgacgacgtcaaccacaaccagcactacgtgcaagacgccgggcaggttctggggctgctacgaccagacgacaacgacgtcgatgacgaccagcagcactgcaacacaggatcagagcactatcacgtctcccccaagcatgcccaaccccacgtcagcgccaacagcgactcccacggaggaggatccgccccagaagaggcgttgtgtcgaccgggcctggtacggcatgtgcaggaagtgggagggtgacggccttgaacgcatcgacgacatgtag

SEQ ID NO: 590 - protein, 639 aa, Myceliophthora thermophilia
MFPKRREAGAACTSAGLVTARLLLSFLALPTFPVAAAGHAPSDAQLPLAIEVGPVAPLIPEPPAPAEHTFTLRHIFHHGTYKHPHLHRKQDVTQPKADVWLPAEDGYEAQRIGPLRARSNPLRIQRLVDRRPSVVDPIVAESRKQGFVSVLSPSAWTIDDVPGPNVTDKDTVLTLALMAADAYVEKPGEADWEDVGAPFNRSLDFGWEGDGLRGHVFADETNSTIVIGLKGTSVAVFDGEGTTTNDKINDNLFFSCCCAQQGPWTWQQVCDCATGTYTCNNTCVTQALRDENRYYYAARELYANVTEIYPNSNVWITGHSLGGAVSSFLGLTYGVPVVTFQAVPDALPARRLGLPVPPGADPDAPQEREYTGAFHFGHTADPVYIGTCNGATASCSLAGYAFEAACHTGRECVYDTVGDLGWRVGIGTHRIKSVIRDVILKYDSVPECKFTPECRDCGNWKMYESNGTESTMTSSVPTTTSKTRTRTETCKTPGWWGCLDETTTTTGTETSEVTTSTSSTTTCHTPGWFGCKDKTTTSVTTTETITSTTSTTTSTTCKTPGRFWGCYDQTTTTSMTTSSTATQDQSTITSPPSMPNPTSAPTATPTEEDPPQKRRCVDRAWYGMCRKWEGDGLERIDDM

SEQ ID NO: 591 - DNA, 465 bp, Myceliophthora thermophilia
  CDS (1)...(465)
atggccagctggctcatctcgtcgcttctgaccgccgccagcctagcattgctggtgttgccgatcgacgcctcgccctcgccggcgcaccttcgatcgtcgataacattcagagacaacagcagcaccgtcccggttgtcagagtattgaacggctcaaggcgcccttgcttcaccgtctcgcaacctctgaattcgtcttgggagggcgtgcggaatgccaccgcctatccgaagcactgcatcggctacggcggtgacaatgtcggatacgagctctccgaggactgcctgtacctcaacgtcctcgacgacctgcaccgggcgctcaacagcatcaccaccaccgccgtcgacggcgtccccctcgcccaccggttcccgcccatcctggacggcgacttcgtcgccgactacccgtccaagcagctgcgcgagggcgcttcccccgagtgcgcgcgctga

SEQ ID NO: 592 - protein, 154 aa, Myceliophthora thermophilia
MASWLISSLLTAASLALLVLPIDASPSPAHLRSSITFRDNSSTVPVVRVLNGSRRPCFTVSQPLNSSWEGVRNATAYPKHCIGYGGDNVGYELSEDCLYLNVLDDLHRALNSITTTAVDGVPLAHRFPPILDGDFVADYPSKQLREGASPECAR

SEQ ID NO: 593 - DNA, 1671 bp, Myceliophthora thermophilia
  CDS (1)...(1671)
atgaagctgctgcgctatctcagcattgcgctgccctgcctcggggcggcgaacgcgaggccgcgcgtattcgatagcaaacaccacgtttcataccacgggctcgaccgcaatgggattgaggtcttcctcgggatcccctacggccaggacacgagcggcgccaaccgcttcaagccgcccaggaggcatgttcctctccccgggactgagatcgaagcgacctcctacggccccagctgcccgcagcagtttgggcaatgggcggtccccatctcgttgggcaacatcacggatgtctccgaggactgtttgaggctgaacgtggcgagaccgcgaggcacacacccatgggaccggttaccggtcatggtgtacatccacggcggcagcttctgggcggggaacaaccatgatcccaccatcctgccggacgggctcgtcctcgagtcggtgtggaacgggctgcctgtcattcatgtcgccatgaactaccgcctcggcttctttggattcgcgcagtccggcgcgctcgagtccgagggttccgagaatgccggtctcagggaccagcggctcgctatcgagtggtcttcgggcggcctctcagttggcttgcacataatggcctacggaggcaccaagccggtcccctttcagcagggcatctgccagagccaggcactcgagcccggtatcacgggaaactttaccatcaatgccatgcaggccctggtagactatgtcggctgcaacgcgacggatcttcattccctcgaaacgattgcctgcttgagggcactcgacaccaagaccctcctcgacgccagcctgtccacctatcgtgacgacctcaacatcggcgacatctggctgcccgtggtcgacaacgacttcctcccggccgccccctcgacgctgatccgagaggggcgcttcgccaacgtgaccaccatgatcggctggtgcaataacgacctcaccttcttcaccgatcccgagatccagacgcccgaggacacgcgggacttcatctccggctacgcccccggcctgaccagcgaaaacgtggacaagctcctgtctctctaccccgtgtccgactttgcgagcgcggcgaccgacaccttgtccgccgagttcttccgcgcctccaggatcttccgcgacatcctcatgacctgcgagccgctgttttacgccgaacacatcgcccgggccggcaacgccgtctacctgtacgactggaaccagaccatcctcgagcccttcctcgagcagaagacgggccgggccggctggggacccatccacacggccgagttcgcctacgtctttggcaacctgtcgcattacgacatcgacggcttccccttcaacccgtcctgggccgactaccagctggccgtccggggatcccgctcctggtcgaccttcgcggccaccggccggccgggcagcctggggggccgtgacaccttcacggggttcgggccggccttccaccgcggggacaacaccaccacctacatcttcgtcgccggcgggccgtccgagggcctctcggccattgacgggccgcattcggcgccggcggtgcgcgcgcagaagttgagagagcgctgtgctttcatcaactcgcccgagattatcgaacagctggggtattag

SEQ ID NO: 594 - protein, 556 aa, Myceliophthora thermophilia
MKLLRYLSIALPCLGAANARPRVFDSKHHVSYHGLDRNGIEVFLGIPYGQDTSGANRFKPPRRHVPLPGTEIEATSYGPSCPQQFGQWAVPISLGNITDVSEDCLRLNVARPRGTHPWDRLPVMVYIHGGSFWAGNNHDPTILPDGLVLESVWNGLPVIHVAMNYRLGFFGFAQSGALESEGSENAGLRDQRLAIEWSSGGLSVGLHIMAYGGTKPVPFQQGICQSQALEPGITGNFTINAMQALVDYVGCNATDLHSLETIACLRALDTKTLLDASLSTYRDDLNIGDIWLPVVDNDFLPAAPSTLIREGRFANVTTMIGWCNNDLTFFTDPEIQTPEDTRDFISGYAPGLTSENVDKLLSLYPVSDFASAATDTLSAEFFRASRIFRDILMTCEPLFYAEHIARAGNAVYLYDWNQTILEPFLEQKTGRAGWGPIHTAEFAYVFGNLSHYDIDGFPFNPSWADYQLAVRGSRSWSTFAATGRPGSLGGRDTFTGFGPAFHRGDNTTTYIFVAGGPSEGLSAIDGPHSAPAVRAQKLRERCAFINSPEIIEQLGY

SEQ ID NO: 595 - DNA, 1284 bp, Myceliophthora thermophilia
  CDS (1)...(1284)
atgcgagggattcagagtctcgtgagcctgtccttgctcgccggagcttgggcgaacccgatgcacaagagatggaagcccaacgcgccccggaacccggacttcccccttgacgaagtcgacaagctcgaggagtccatcatgcccaatgttgaggcatggatgtccaagcgcccggccaaatacagcaactgcactctcgagaatgcgggcatccggagggaatggagcgacctctcggtggacgagcgcaaggagtacatcagcgccgtcctctgcctccagtccaagccttccaagattcccgagggcgaggtccctggggccctgagccgcttcgacgactttgtggcgacgcacatgaccatggcaggccagctgcacagcccaaccaacctatttgccgcccaccggtacttcatccacgcctacgagaaggcactgcgtgaggagtgcggctacaaggggtatcagccgtacatgaactacgaccgctatgctgacgaccccctcaacacacccttgtttgacggcagtgacagcagcatgagtggtaacggcggtccgtacaactactccggcatcccccagcccttcccaaagccgtataacttgattcctccggctggtggtggcggttgtgtcaccgagggccccttcagagaagaggatgcgcacaacaacagcatggtagtctcgctgggccccaagggcggcctcttccacgacataccgcgcaacccgcgggcggacggactaggctccaacccgcggtgcctccgccgcgacgtcaacaagtattcggcccgaggcgcccgcgccaactacacctacagcgccatcatggacaacccggatatcgacagcttctacaaccgctacatgggcatgccgcagctcaagggggacccttacccgtggggtctccatagctccggccactacctcatcggtggcgacccgggcggcgacttctactgctctcccggcgacccgctcttctacttccaccacggcatgctcgaccgggtctggtggatctggcagatgcaggacccggagaaccgcgtccaagccgtcccggggaccaacacgatgccgatgccgcccttgatggccgccaacttggagagcgaggcggccgcgacgacgacgcacaagcgggcggtcaacgtcagcgacctggttgtggacctgggctggacggcgcccccggtcaagttggtcgacctgaacgagcagctgggcggtctgggcggcgagctgtgctacatctacgtgtga

SEQ ID NO: 596 - protein, 427 aa, Myceliophthora thermophilia
MRGIQSLVSLSLLAGAWANPMHKRWKPNAPRNPDFPLDEVDKLEESIMPNVEAWMSKRPAKYSNCTLENAGIRREWSDLSVDERKEYISAVLCLQSKPSKIPEGEVPGALSRFDDFVATHMTMAGQLHSPTNLFAAHRYFIHAYEKALREECGYKGYQPYMNYDRYADDPLNTPLFDGSDSSMSGNGGPYNYSGIPQPFPKPYNLIPPAGGGGCVTEGPFREEDAHNNSMVVSLGPKGGLFHDIPRNPRADGLGSNPRCLRRDVNKYSARGARANYTYSAIMDNPDIDSFYNRYMGMPQLKGDPYPWGLHSSGHYLIGGDPGGDFYCSPGDPLFYFHHGMLDRVWWIWQMQDPENRVQAVPGTNTMPMPPLMAANLESEAAATTTHKRAVNVSDLVVDLGWTAPPVKLVDLNEQLGGLGGELCYIYV

SEQ ID NO: 597 - DNA, 1809 bp, Myceliophthora thermophilia
  CDS (1)...(1809)
atgacgacgacggaagccgagaaggtggacgtgctcatctgcggcagcgggtcggccgggctgtgcgcggccgtgtggctcgcccggttcggcgtcaactaccggatcctcgagcggcgggacgggccgctgaagacggggcaggccgacggggtgcagacgcggacggtcgagattttcgacagcttcggcattgccgaggagctgctccgggaggcctaccacgtcctcgaggtcgccttctgggcgccggacccgcgcgaccccggcgagatcgcccggacgcggtacgccgccgacaaggagacggccatcagccaccagccccacgtgatcctcaaccaggcccgcctgaatgcgctcatgacggggctgttggggccggagccgccggtcgagtacggctgcgaggtgagggaggtccgggtcgacgacggggccgccgccgaggacccggacgcgtacgccgtgacggtgacggcggtcaaggacggggtagagaggacctacagggccaaatacgtcctgggctgcgacggggcgcacagcacggtccggcggtcgctcgggttcaagatggtgggcgacagcagcgacgcggtctggggcgtcatggacgtgtacccgcggacggatttccccgacatccgcaagaagtgcgtcatcaactcggcggccggcagcatcctcgtggtgccgcgcgagggcgacgcgctggtccgcctctacacggagctgccggcgggcacgcgcgtggccgacgtgagcctcgagggcctgcaggcgcacgcgcgccgcgtctttggcggccgctacccgctcgactttgccgagacggcctggtggtcggcctactccatcggccagcgcctcgccgaccgcttccaccgcgcccaccgcgtcttcctcaccggcgacgcctgccacacccactcgcccaaggccggccagggcatgaacgtcagcctgcaggacggccacaacgtcggctggaagctcggaatggtcctgcgccgcctcgcccgcccggacgtcctgctgcccacgtacgtgctcgagcgcgagcgcaccgccgccgatctcatcgacttcgaccgcgcctttgcccgcctcttcgactcgcgctaccgccgagagaaccacgtgtcgccccgggacgtcgccgaccacttcgtccgcgccggccgctacaccgcggggcaggccgtccgctacgacccctccgtcatcacggccgccaccccttcctcttcttcttcttcttcttcttctgtagcctcgggcctcaccgtcggcatggccttccgcagcgcccaggtcgtccgcttctgcgacgccaaggccatgcagctcgtcaagggcatgcccgccaacggccagtggtacctcgtcgtctttgccggcgacctggcccggcccgagtccgcggcgcgcctgagagaggtcacccgctcgctcgagcgcatcgcctaccgcttcaccccgccgggggccgacccggacagcgtcatcgaccggatcttggtcctcgcgtccgaccggaaaacggtcgagcaggacgagatccctgcattcttcacccccgtgacgggcaaacggggcatgaaatgcctgaccaaggtgtttgccgacgaggagagctacaactcgggacacgggcacgcatacgaggcgtacggggtccatcccgagagaggagcgctggtggtcgtgcggccggatcactacgtgtccaagatcgcttccctggacgaggccgactcgttagagcagtttttcgaagggtttatgattccgcagcggacctga

SEQ ID NO: 598 - protein, 602 aa, Myceliophthora thermophilia
MTTTEAEKVDVLICGSGSAGLCAAVWLARFGVNYRILERRDGPLKTGQADGVQTRTVEIFDSFGIAEELLREAYHVLEVAFWAPDPRDPGEIARTRYAADKETAISHQPHVILNQARLNALMTGLLGPEPPVEYGCEVREVRVDDGAAAEDPDAYAVTVTAVKDGVERTYRAKYVLGCDGAHSTVRRSLGFKMVGDSSDAVWGVMDVYPRTDFPDIRKKCVINSAAGSILVVPREGDALVRLYTELPAGTRVADVSLEGLQAHARRVFGGRYPLDFAETAWWSAYSIGQRLADRFHRAHRVFLTGDACHTHSPKAGQGMNVSLQDGHNVGWKLGMVLRRLARPDVLLPTYVLERERTAADLIDFDRAFARLFDSRYRRENHVSPRDVADHFVRAGRYTAGQAVRYDPSVITAATPSSSSSSSSSVASGLTVGMAFRSAQVVRFCDAKAMQLVKGMPANGQWYLVVFAGDLARPESAARLREVTRSLERIAYRFTPPGADPDSVIDRILVLASDRKTVEQDEIPAFFTPVTGKRGMKCLTKVFADEESYNSGHGHAYEAYGVHPERGALVVVRPDHYVSKIASLDEADSLEQFFEGFMIPQRT

SEQ ID NO: 599 - DNA, 1422 bp, Myceliophthora thermophilia
  CDS (1)...(1422)
atgggtgaatgtcctgttcgccactccgccaacgtcgccggcggcggcacgcgcaacaccgactggtggccgaaccagctccggctcaatatcctccggcagaatcaaccggcgtcgaacccgcagaaggacctggactatgccgccgccttcaagtcgctcgactacgagggcctgaagaaggacctccgcgcgctcatgacggactcgcaggactggtggccggccgactttggccactacggcggcctcttcatccgcatggcctggcacagcgccggcacctaccgcgtctttgacggccgcggcggcggcagccagggccagcagcgcttcgccccgctcaacagctggccggataacgtcagcctcgacaaggcccgccgcctgctgtggcccatcaagcaaaagtacggcgacaagatctcgtgggccgacctgctgctcctgacgggcaacgttgccctcgagtcgatgggcttcaagacgtttggcttcgccgccggccgccccgacgtcttcgaggcggacgagtcgatctactggggaggggagcagacgtggctcggcaacgacgtgcgctactcgcaaggccgcgagggcgtcgccggccagggcgccctgggcggcgacgagtccaagaaggaccacaaggacatccgcacgcgcgacctcgagacgcccctggcggcctcgcacatgggtctcatctacgtcaaccccgagggccccgacggcatccccgaccccctcgcggccgcccgggacatccgcatcacctttggccgcatggccatgaacgacgaggagacggtcgccctgatcgccggcgggcacacgttcggcaagacgcacggcgccgcccactcggacaatgtcggccccgagcccgaggcggccccgctggagcagcagggcctcggctggagcaacaagcacgggtccggcaagggtcccgataccatcacgagcgggctcgaggtcatctggaccaaggagccgaccaagtggaaccacaacttcttcgagtacctcttcaagttcgaatgggagctcaccaagagccccgccggcgccaaccagtgggtggccaaggacaccgacgccttcatccccgacccctacgacccgaacaagaagcacaagccgcgcatgctcaccaccgacctggcgctgcgcttcgacccggtctacgagaagatctcgcgccgcttcctcgagcacccagaccagttcgccgacgcctttgcgcgcgcctggttcaagctgctgcaccgcgacatgggcccgcgctcgcgctggctcggccccgagatcccggccgaggtgctcccctgggaggaccccatcccgcccgtcaaccacccactcgtcgacgacaaggacatcgccgccctcaagcacgacatcctggccaccggc

SEQ ID NO: 600 - protein, 474 aa, Myceliophthora thermophilia
MGECPVRHSANVAGGGTRNTDWWPNQLRLNILRQNQPASNPQKDLDYAAAFKSLDYEGLKKDLRALMTDSQDWWPADFGHYGGLFIRMAWHSAGTYRVFDGRGGGSQGQQRFAPLNSWPDNVSLDKARRLLWPIKQKYGDKISWADLLLLTGNVALESMGFKTFGFAAGRPDVFEADESIYWGGEQTWLGNDVRYSQGREGVAGQGALGGDESKKDHKDIRTRDLETPLAASHMGLIYVNPEGPDGIPDPLAAARDIRITFGRMAMNDEETVALIAGGHTFGKTHGAAHSDNVGPEPEAAPLEQQGLGWSNKHGSGKGPDTITSGLEVIWTKEPTKWNHNFFEYLFKFEWELTKSPAGANQWVAKDTDAFIPDPYDPNKKHKPRMLTTDLALRFDPVYEKISRRFLEHPDQFADAFARAWFKLLHRDMGPRSRWLGPEIPAEVLPWEDPIPPVNHPLVDDKDIAALKHDILATG

SEQ ID NO: 601 - DNA, 917 bp, Myceliophthora thermophilia
  CDS (1)...(915)
atgggctctgtcttctctcgtcccgcggcggctgccgcaacgcccacggtgcttccgactctgaccatccgcaacctcaccgtcactccgctagagctgaggctggtcgagcacctgaagtcagtccatcatcatcacccgcacctccacaagcccaacggcctcgtcaagacctcgtcacgctcaagcaacccagagcagtcgcacgaacaaccggatgcgccattaccgtcgacggcaacgcccgtcagcggcaccattgagcccttctcggagtgccgcaccgcagtttacgccccggatgcggcccgtcatgagcagctgcggctgaccttcgaagaccccgccaccggacaccgctacagcgccgacatcccaggctcgtcgcggcggagcatagtcctcaaggcgcaccatcccgccggtgccggggacggcgagaccaaggagttcacggccatctacctgcccgagcacgcctacctcgccctcttcagctcggccaacctctcctcctggatgtccaccctggacccggccctgcccctgtccgccctctccatcccgggcacccacaactcgcccacctgctacgtcgccctcccctcggtccgctgccaggccgtctccgtcctcgaccagctcaacaacggcgtgcgcttcctcgacgtgcgcgtctcctgcccgccctaccgcgccagcaccgtatccgcaccctccaattcttccccaaagggaggggaagaagaagaaggagaagaagagcaggagggaggaggagaaggcacgcgcgtgccggagctcgccctggtgcactcggccttccccgtgtccctgacgggacccaagtacctctcggggctgctggcgaccgtgtacgacttcctggccgcgcaccctaccgagacggtgctgct

SEQ ID NO: 602 - protein, 305 aa, Myceliophthora thermophilia
MGSVFSRPAAAAATPTVLPTLTIRNLTVTPLELRLVEHLKSVHHHHPHLHKPNGLVKTSSRSSNPEQSHEQPDAPLPSTATPVSGTIEPFSECRTAVYAPDAARHEQLRLTFEDPATGHRYSADIPGSSRRSIVLKAHHPAGAGDGETKEFTAIYLPEHAYLALFSSANLSSWMSTLDPALPLSALSIPGTHNSPTCYVALPSVRCQAVSVLDQLNNGVRFLDVRVSCPPYRASTVSAPSNSSPKGGEEEEGEEEQEGGGEGTRVPELALVHSAFPVSLTGPKYLSGLLATVYDFLAAHPTETVL

SEQ ID NO: 603 - DNA, 2601 bp, Myceliophthora thermophilia
  CDS (1)...(2601)
atggcgcccctcgctagcgagccgcgccaggtgctcacggtcctcaatcccgcccggcgcaaggccctatacacgctgctggtcgagatcacggcctttatgcgctcgcagctcgactttaacgagccggcaggaggaggccaccagggagccgctccgctgctcgtcgacccgtccgccgataacagtatcatcattcccgctggcacagcgggagcaaacgatgccgctcctcccaacccggccctcgtgcgcctgcgcgccgccgcagtcgagcactttgacggttggcgcaaggatgtcctggccaagctgaaggagctgctctcgaccccggacgacgcctccattgtcgaggaacgccgcaagcggaccgaacgaatcgccgcgcagcagcggcagcagcggcagcaacaggagcagaaaaataataccggctcttccactgacacccgaagggtggacctgttaggttcttgggatgcgtggcccgaggatgaccggggggacggggccaagaccgagggcggaagagggcagacggaggaacaggaagagaacactggcgacgccgtggcccgcctgcagtcgcactggcaccccatcccgacccgcctggtgacgatcccggaagaggaccgcaaggaggcgctgagctgcgtcttgctggtgctgctgtcgacgggccattactcggcccactcgagggccctggccgtgtatctcacctcggcgctggagctgcccttggccgtcctgaacgccgaggaggtcgagatcgcggtgtctctggtcgagcgctcggccgaggcggagaggcagcagcggaccatgtctgccgaggccgaggccgagaagcggaagcaacagaaccaggcgagccggtactggaaggtcggcctggcctccgtggccggcgccgcgctgatcggtgtcaccggtggcctggccgctcccgtcgtcgctggggcgatcggcggaatcatggggtctgtaggactcggcggggttgcctccttcttgggcatcttttggatgaacggagcactggttggcacgctgttcagtgccttcggcgcgagaatgacgggcgagatggtggaccgatatgccagggaagtcgacgacttccgcttcattcccctgaaagacgagtggggcacccgcggcagtagccaaaacgacagacgcctccgggttaccatcggcatcaacggatggctgggtacggaagatgatgtggccaagccgtggcgcgctctcggtgacgactcgggggcgttcgctctacggtacgagatgaagagcctccttgggctgggcaagtctctgcgggaactcgtctcttcctacgcctggaacgcggtcaaggttgaggtcctcaagagaaccgtcttggccaccctatggtcggccctgtggcctgcctacatgctgtccatggcctccaccgtcgacaaccccttcagcctcgccaagaacaggtcggagaaggcgggcgaggttctggccgatgctctgatcaacaaggtccagggcgagcgcccagtcaccctgattggttactctctgggggcgcgcgtcatctactcatgcctccggtccttggccgcgcgccgcgcctttggcgtggtcgactcggtcgtcttcatcggtgcccccgtcccctcgaacagacaacactggcaaatgatgcgcaccgtagtgtcaggcaagttgttcaacgtctactcggagaatgactacctgctcgccttcctctatcgtgcaacatccattcagctcggcgttgccggactacaggagatcaaggacatcgagggggtcgaaaacctcaacctgactgaagaagtccaaagacacatgcggtacgccaagctcatcgccaagatcctcgccagatgcggtattcccgtcgtcaagggcgcatcggctcccattgaggaagacgaggatgctatcaaactcacctacccggacaaggagaacgcgaatctcatcgatctcgacggtttgaacatcacggcccctcccgaagaggttcagcccgctccaccacggtttcagaaccgcacgccaggctcccagccgcaattcgcccaacgcaacgagcagcggacggcagcaacaggggcgggaccgtccgccgtcgcggccggccgggacctcctagacctcgagtcgccgaacagttccggcgggcccgctcaacgcacggcggcaataccgtccccttccatgcccacacccacaccgcaacccgctgccgcccggcagagcccagacccgccagagtacgcgcctcgggaacttcccaacacaaagttgttcatgatgccccaggtgcccgaccggtctctgcaagcctacgtcccgcccggccctgcggcgtcctccgcttcttctgcccccgcggtgcccgcatcgcagatgtcggcgcatcaccttccaacatcgcacagccagagcgcggtagacggtattgaagacgacgacggcagtgacgaggaaggtgggatgggaatcaagatggtggataacgacgatggccttgaatattgtgatccgacccctctcgaggaagatccgaattggaggtga

SEQ ID NO: 604 - protein, 866 aa, Myceliophthora thermophilia
MAPLASEPRQVLTVLNPARRKALYTLLVEITAFMRSQLDFNEPAGGGHQGAAPLLVDPSADNSIIIPAGTAGANDAAPPNPALVRLRAAAVEHFDGWRKDVLAKLKELLSTPDDASIVEERRKRTERIAAQQRQQRQQQEQKNNTGSSTDTRRVDLLGSWDAWPEDDRGDGAKTEGGRGQTEEQEENTGDAVARLQSHWHPIPTRLVTIPEEDRKEALSCVLLVLLSTGHYSAHSRALAVYLTSALELPLAVLNAEEVEIAVSLVERSAEAERQQRTMSAEAEAEKRKQQNQASRYWKVGLASVAGAALIGVTGGLAAPVVAGAIGGIMGSVGLGGVASFLGIFWMNGALVGTLFSAFGARMTGEMVDRYAREVDDFRFIPLKDEWGTRGSSQNDRRLRVTIGINGWLGTEDDVAKPWRALGDDSGAFALRYEMKSLLGLGKSLRELVSSYAWNAVKVEVLKRTVLATLWSALWPAYMLSMASTVDNPFSLAKNRSEKAGEVLADALINKVQGERPVTLIGYSLGARVIYSCLRSLAARRAFGVVDSVVFIGAPVPSNRQHWQMMRTVVSGKLFNVYSENDYLLAFLYRATSIQLGVAGLQEIKDIEGVENLNLTEEVQRHMRYAKLIAKILARCGIPVVKGASAPIEEDEDAIKLTYPDKENANLIDLDGLNITAPPEEVQPAPPRFQNRTPGSQPQFAQRNEQRTAATGAGPSAVAAGRDLLDLESPNSSGGPAQRTAAIPSPSMPTPTPQPAAARQSPDPPEYAPRELPNTKLFMMPQVPDRSLQAYVPPGPAASSASSAPAVPASQMSAHHLPTSHSQSAVDGIEDDDGSDEEGGMGIKMVDNDDGLEYCDPTPLEEDPNWR

SEQ ID NO: 605 - DNA, 1935 bp, Myceliophthora thermophilia
  CDS (1)...(1935)
atggcttggaggcgcctagccgcggcgccggcgctctcgcgtgccgccagaaacccgatccgcgcattttccacaacacggccagtcgcccgcgtcatcgccaacgggccgctccgtgcgaaggaggcgtccccgttcgtaagcagcaagtacccggtcatcgatcatgagtacgacgccatcgtggtcggtgccggcggtgccggtctgcgtgctgccttcggtcttgccgaggccggcttcaacacggcttgcatttccaagctcttccccactagaagccacacggtcgctgcccagggtggcatcaacgccgctctcggcaacatgcatgaggacgactggcggtggcacatgtacgacacggtcaagggctccgactggcttggcgaccaggacgccattcactacatgacccgtgaggctcccgcctccatcgtcgagcttgagaactacggctgccccttctcccggaccgaggatggcaagatctaccagcgtgctttcggtggtcagtcccagaagtacggcaagggcggccaggcctaccgctgctgcgccgccgctgaccgtaccggccacgccctgctccacaccctctacggccagtcgctcaggcacaacaccaactacttcattgagtacttcgctatcgacctgatcatgcaggacggcgagtgccgtggtgtcttggcgtacaaccaggaggacggcacgctgcatcggttcctcgccaacaacaccgtcctggccaccggtggctacggccgcgcctacttcagctgtacctcggcccacacctgcaccggtgacggcatggccatggtcgcccgtgccggtctgcccaaccaggatctcgagttcgtccagttccatcccactggtatctacggggccggctgcctgatcaccgagggtgctcgcggtgagggtggctacctcctcaactcggagggcgagcgcttcatggagaggtacgccccgacggccaaggatcttgccagccgcgacgtcgtctcgcgttccatgaccatggagatccgcgagggccgcggtgtcggccccgagaaggaccacatctacctccagctcagccacttgccccccgagatcctcgccgagcgtctccccggtatctcggagaccgccggtatctttgccggcgtcgacgttcgcaagcagcccatccccgtccttcccaccgtccactacaacatgggcggcattccgacccgctacaccggtgaggtccttaccgtggacgagaatggcaacgacaaggtcgtccccggtctcttcgcctgcggtgaggctgcctgcgtctccgtccacggtgccaaccgactgggtgccaactcgctgctcgacctggtcgtcttcggccgtgccgtctcgcacaccatccgcgacaagttcacccccggcgccaagctgaagccgatcgaggccgacgccggcgcccagtcgatcgagacgctcgacaagatccgcaactcgaacgggcccaagtccaccgccgagatccgcctggccatgcagaagaccatgcagcgcgaggttagcgtcttccgtacccaggagagcctggacgagggtgtcaggcagatcaccgaggtcgaccagatgttctcgcaggtcggcatcaaggaccgcagcatgatctggaattcggacctcgtcgagacccttgagctccgcaacctgctcacttgcgctgtgcagaccgccgtctcggccgcgaaccgcaaggagtcccgtggcgcccacgcccgtgaggactatcccgagcgcgacgacaagaactggatgaagcacacgctcagctggcagaaaacgccgcacggcaaggtcgagctctcgtaccgccgcgtcatcgacaccaccctcgacgagaacgagtgcaagcccgtgcccccgatgaagcgtgtctactaa

SEQ ID NO: 606 - protein, 644 aa, Myceliophthora thermophilia
MAWRRLAAAPALSRAARNPIRAFSTTRPVARVIANGPLRAKEASPFVSSKYPVIDHEYDAIVVGAGGAGLRAAFGLAEAGFNTACISKLFPTRSHTVAAQGGINAALGNMHEDDWRWHMYDTVKGSDWLGDQDAIHYMTREAPASIVELENYGCPFSRTEDGKIYQRAFGGQSQKYGKGGQAYRCCAAADRTGHALLHTLYGQSLRHNTNYFIEYFAIDLIMQDGECRGVLAYNQEDGTLHRFLANNTVLATGGYGRAYFSCTSAHTCTGDGMAMVARAGLPNQDLEFVQFHPTGIYGAGCLITEGARGEGGYLLNSEGERFMERYAPTAKDLASRDVVSRSMTMEIREGRGVGPEKDHIYLQLSHLPPEILAERLPGISETAGIFAGVDVRKQPIPVLPTVHYNMGGIPTRYTGEVLTVDENGNDKVVPGLFACGEAACVSVHGANRLGANSLLDLVVFGRAVSHTIRDKFTPGAKLKPIEADAGAQSIETLDKIRNSNGPKSTAEIRLAMQKTMQREVSVFRTQESLDEGVRQITEVDQMFSQVGIKDRSMIWNSDLVETLELRNLLTCAVQTAVSAANRKESRGAHAREDYPERDDKNWMKHTLSWQKTPHGKVELSYRRVIDTTLDENECKPVPPMKRVY

SEQ ID NO: 607 - DNA, 879 bp, Myceliophthora thermophilia
  CDS (1)...(879)
atggaggaggagacggaggaggagacggaggaggaggaaacccgggtggggacggagaatgggagaggggccagggagatcgtcgtcgcctttcgcggcacgtacagcatcacaaacaccatcgtcgacctgagcaccgcgccccaggagtacgtcccttacccggcgccgcctggagacgggaacggagatgggaacgggggcggcggcaagtgtcacaattgcaccgtgcacatgggcttcatggcctcgtggcggaacgctcgcgaggtggtgataccggccctcaaggccgcccgcgagcggtatcccgggtaccgggtgcatctcatcggacatagcctgggcggggccgtcgcggcgctcgcggcgctcgagctccggctgggactcggctggcgagacgtggtcgtcacgacctttggggaaccgagggtggggaacgcggaattggccgactacatcaaccgggcgttcgggctcggggtccgggacggagacggcgctggcgaggaggtcgcatatcgccgcgtcacgcacgctggcgacccggtgccgctcctgccgctgagcgagtggggttaccaggcgcatgccggggagatctatatcagcaagccggacctgcctccggcgccggaggacttgaggctgtgccacgggaacaacgacccacggtgtttgagcgacgctgaggcactactgggcttgggccgatggttcccggcgcggcttcagctgtggcaactgctgttcgcgcaccgagactacttctggaggttggggctctgcgtcccggggggagacccggctgactggggaagggagaaatacaacctgacggtcgacggtgctcgggatgagatacaggatttatga

SEQ ID NO: 608 - protein, 292 aa, Myceliophthora thermophilia
MEEETEEETEEEETRVGTENGRGAREIVVAFRGTYSITNTIVDLSTAPQEYVPYPAPPGDGNGDGNGGGGKCHNCTVHMGFMASWRNAREVVIPALKAARERYPGYRVHLIGHSLGGAVAALAALELRLGLGWRDVVVTTFGEPRVGNAELADYINRAFGLGVRDGDGAGEEVAYRRVTHAGDPVPLLPLSEWGYQAHAGEIYISKPDLPPAPEDLRLCHGNNDPRCLSDAEALLGLGRWFPARLQLWQLLFAHRDYFWRLGLCVPGGDPADWGREKYNLTVDGARDEIQDL

SEQ ID NO: 609 - DNA, 1938 bp, Myceliophthora thermophilia
  CDS (1)...(1938)
atggcgcgctgtcaaatgactctcctcttcccgatcgtctgcctcgtcagcgctctcgtttcagcccaatattcaggttatgactatggatttgacgtcaagaagcgggtcaagcgccagctcggccaacgttcggccatggtcgtgcaggacaagaccggcagcgagatccaggtgcgccaggaaattcgtcaacttgagcaggaccatgacctctggaccctgtacatcctaggcttgagcatgctgcagtataccgaccaggaatctcccgtgtcttattatggactcgcggggatacacggaatgcctcaccagacttggggcggcatgggaccagtcaccggaaacgagaataccgggtattgtacccattcgtccgtcctgttcccgacatggcaccgggcatacatggctctatacgagcaagttttgcacgatctaatccagatgatcgccacgttctggcccgacagcgagagacagcgctacgagagtgccgcccgcaggttccgcctcccttactgggactgggcggcaagccctcctccgggacaaagcgttctccctgagagcatcggaggaagtccatttattgacgtcaacggaccgaatggcttgcagcggatcgcgaaccccttattcagctaccagttcaaccctctcgatcagaaggcttttgaaagtccatcaagtggcggccctgacgcgcagtccaacaacacgctcgtcgccctgaacctcgatcggagccgcgcctccatcgctcagcgcctctatgatttattttcgcacaacgataactacactctgttcagcaacaatgccgtggggggacaggctgaatcggtagaatcgctgcacgacaccatccatagcttagttggcggcgtcgggcctagtcagtcagtacctcagcctgggcacatgacgtacatccagtggtcggccttcgatcccgtcttcttcctgcatcactgcatggttgaccggattttcgccttgtggcaggcgattcaccccaacacttgggttccctcgtctcaagctctgctggactcgtacaccattcggaggggccagtccatagactctggtacagcactcactcccttcttttccaacgacaacggcacattctggacttctgacggcgtgcgcgaccacacaaggttcggctatacgtacgccgagttgctgcgcggtcccgtcaccggctcttcaaacaataccctcttagccgcatctcaaatacgcatagtaaaacaggccgtaaaccgcatgtatggctctttcagcccggccttcttctttctcgaagagcttcgcattcaaggcggcgctgccgtggtaggcgccggcttccgaaacaaccacaggaaaacggcgccgctccatggtctactggaatccaaaatctttgttgcggggagcaacggcaaccgctactacgagtggaaggtagatgtgtgcgtagggcgcaacggcagccaaggtattctcggcggcgacggaattgacgggtcttcaatcagtttcttccttggcgacctttcttctcttaacaatttgttgaatgacacccatgttgggaccatgggcgtgtttacctccgctcgcttgtcgcaacatgaaccggctggtgggcatgatgtgcctatctcagggagcgtgcctctgacggccgcgctggtgaagaagatctgcgaaggcgagctcgcggggttggcttcaggacatgtggtgccgtacttgaagagaaacctgaagatggtgatgcgagggacccagagagaggtggtggcgggcacagacgataagaagatttgtgaaacactcttgagtcttcggatcgttagctcggtggttgaggcgccgtggagcgaggatgaattgccgaaatggggagaggaaagagtagagtttgatgtgtgctga

SEQ ID NO: 610 - protein, 645 aa, Myceliophthora thermophilia
MARCQMTLLFPIVCLVSALVSAQYSGYDYGFDVKKRVKRQLGQRSAMVVQDKTGSEIQVRQEIRQLEQDHDLWTLYILGLSMLQYTDQESPVSYYGLAGIHGMPHQTWGGMGPVTGNENTGYCTHSSVLFPTWHRAYMALYEQVLHDLIQMIATFWPDSERQRYESAARRFRLPYWDWAASPPPGQSVLPESIGGSPFIDVNGPNGLQRIANPLFSYQFNPLDQKAFESPSSGGPDAQSNNTLVALNLDRSRASIAQRLYDLFSHNDNYTLFSNNAVGGQAESVESLHDTIHSLVGGVGPSQSVPQPGHMTYIQWSAFDPVFFLHHCMVDRIFALWQAIHPNTWVPSSQALLDSYTIRRGQSIDSGTALTPFFSNDNGTFWTSDGVRDHTRFGYTYAELLRGPVTGSSNNTLLAASQIRIVKQAVNRMYGSFSPAFFFLEELRIQGGAAVVGAGFRNNHRKTAPLHGLLESKIFVAGSNGNRYYEWKVDVCVGRNGSQGILGGDGIDGSSISFFLGDLSSLNNLLNDTHVGTMGVFTSARLSQHEPAGGHDVPISGSVPLTAALVKKICEGELAGLASGHVVPYLKRNLKMVMRGTQREVVAGTDDKKICETLLSLRIVSSVVEAPWSEDELPKWGEERVEFDVC

SEQ ID NO: 611 - DNA, 1509 bp, Myceliophthora thermophilia
  CDS (1)...(1509)
atgcatcgtttgcaaggggccctgatcgtgctactgaaccctctcctctggctcggcacactaggactacccagaccccaaattggcgactatggggcgaacgagggccccgtgggtggcgtcagcccgcctattccgacagtcacgtccagcagcggctcgctgcgaggagactcgggccttctagggggcaacgctccgctgcccgacccggaaaagtccgactcggccattgtccccaatccgcagctcgtcaacgggcaagaagcggacgcgaagctcgggctctacctcgacttcgacagcgccgatcctccccagccgatccgtggggagaacgggaacacggatcccggcccacgcacctttgagtacgagaaactcaatcccgacctcttcgcgcccccccggaccgacgcgggggacatgcccaacctgatgtggcccatggggttgtcccacaaccgcccgggcacgggcaagaactcgggctgggcgaggcagcagaacgttgacgtcctgccggaagccaaggccatggcgggcgtcgacatgcgcctggccccgaatgcctaccgagaactgcactggcacacggccaacgagtgggcgatgattctcaagggctgcgttcgcgtggccgccgtcgacgacgagggccgcaacttcgtagacgacgtctgcgccggcgacgtgtggttcttccccgccggcataccgcacagcatccaggccttcgagaagggggccgagttcctgctcgtgttcgaccagggcgacttcaccgaggacggtaccttcctcgtgtccgagctgttcctccggaacccggtcgaggtgctcagcaaggacctgcgcgccggcgtcgacgccttcgagaacctccccaaggaccagctctacatcttcaacggcacccccgcgcccgccgacatctcggagcagaacgtcacctcgccggccggcgccatcaccggcaacgcctcctacacgtaccactggtcccaacaggccccctacaccgtccccggcggctccatcaagatcctcgaccccctgactttccccgtagccagcatgttctcggccgcgctggtcctcgtgcagccgggcgccctgcgcgagattcactggcacacgacctcggacgagtggaacttcttcctccagggggccgggcgcatcaccgtgtacggggcgccggcgtcgtcgcggacctacgacttcacgggcggcggcgtgggctacgtgccggccgcctgcggccactacgtcgagaacacgggcgaggaggacctcgtcttcctcgaggtcctgcaggcgcccaagttcaccgacatcagcgtcgcccagtggctcgccctgaccccgcgccaggtcgtcagggaccacctgaacctccccgacgccgtcctcgacgccctgccccgcgagaagcccatcatcctgacgggcaaccagaacttgaccgctctcgccgccggcggcagtgctttctcgatttcgtag

SEQ ID NO: 612 - protein, 502 aa, Myceliophthora thermophilia
MHRLQGALIVLLNPLLWLGTLGLPRPQIGDYGANEGPVGGVSPPIPTVTSSSGSLRGDSGLLGGNAPLPDPEKSDSAIVPNPQLVNGQEADAKLGLYLDFDSADPPQPIRGENGNTDPGPRTFEYEKLNPDLFAPPRTDAGDMPNLMWPMGLSHNRPGTGKNSGWARQQNVDVLPEAKAMAGVDMRLAPNAYRELHWHTANEWAMILKGCVRVAAVDDEGRNFVDDVCAGDVWFFPAGIPHSIQAFEKGAEFLLVFDQGDFTEDGTFLVSELFLRNPVEVLSKDLRAGVDAFENLPKDQLYIFNGTPAPADISEQNVTSPAGAITGNASYTYHWSQQAPYTVPGGSIKILDPLTFPVASMFSAALVLVQPGALREIHWHTTSDEWNFFLQGAGRITVYGAPASSRTYDFTGGGVGYVPAACGHYVENTGEEDLVFLEVLQAPKFTDISVAQWLALTPRQVVRDHLNLPDAVLDALPREKPIILTGNQNLTALAAGGSAFSIS

SEQ ID NO: 613 - DNA, 1356 bp, Myceliophthora thermophilia
  CDS (1)...(1356)
atggcaaagaaggtcgacgccatcctcaagagctatgtcgccgacggcactgcgaccaaggacaagctccttggagcggcatttgttgtcgtgaacaaggatggccccatctaccaaggctcggcaggccgcaccggcatcgacccaagctcggccgccttcactcctcactcaatcgcctggacggcgtccctgtcgaagctggtgacgacgctgacgctgatgcacctcgtcgagcaccgtgacgacaagaacaaaaacaacaacaacaacaacaacaacaacaacaacatccagagcacgctcgacgaggatgtgcgcccgcgcgtacccgagctcgcacggctgccgatcctgcgaggcttcgccgcgggggggctggcaacgcgtcacccggacaacaagaaagaggaaggcgagccgctgctggagcccaacacggcacccatcacgctgcgccacctgctcgcgcacacggccgggctgggcctcgacattgccgacgcggacctggaacgctggtcgcgctgggtcggccgcaccgcccgcgccagcacgtccaccgtcgagggctggtcgaccccgctccgcttcccgccgggggaagggtggtactacggcacgggccccgactgggccggccaggtgctcgagcgcgtcaccggccgccggctgagcgagtacatggacgagcacgtcctgcggccgctcgggatcacccggggcacgggtttctacatcgacaagctggtcggcggggacgagaaagaggaggatgaggagggcgggagggacggcggccgacagctggtgaccctgacggagcgcgacgggcagacgggcgagctcagggagcgagacgtgccgttcccggtcgagcccccctgcgagagcggaggggccgggctgtacacgaacgcggccgactacgggagggttctgcaggagctgctgagggctttggcgggagacgagggagccgtcatcaagaaagagacggccgaggagatgttccggccccagctgaatgacaagcagagggagtggcagaggagcatcgtctgggaattcggcgcggccgcagagatcccggagggctcgctcgttgactttgggctggggggaatgctgaacatggaggatgtagagggcaagagaaagaagggtagcatgatgtggtcgggcttctgtaacgggcgatggatcatcgagtggatcgattcccggacaggcattgccgccgtcatgtttacctgcctattcccgtactcggatccgaccgccatcgagctctatgacaagctagagcggaccgtgtatgcggaccttattccggattggcaggcgtcgaagtaa

SEQ ID NO: 614 - protein, 451 aa, Myceliophthora thermophilia
MAKKVDAILKSYVADGTATKDKLLGAAFVVVNKDGPIYQGSAGRTGIDPSSAAFTPHSIAWTASLSKLVTTLTLMHLVEHRDDKNKNNNNNNNNNNNIQSTLDEDVRPRVPELARLPILRGFAAGGLATRHPDNKKEEGEPLLEPNTAPITLRHLLAHTAGLGLDIADADLERWSRWVGRTARASTSTVEGWSTPLRFPPGEGWYYGTGPDWAGQVLERVTGRRLSEYMDEHVLRPLGITRGTGFYIDKLVGGDEKEEDEEGGRDGGRQLVTLTERDGQTGELRERDVPFPVEPPCESGGAGLYTNAADYGRVLQELLRALAGDEGAVIKKETAEEMFRPQLNDKQREWQRSIVWEFGAAAEIPEGSLVDFGLGGMLNMEDVEGKRKKGSMMWSGFCNGRWIIEWIDSRTGIAAVMFTCLFPYSDPTAIELYDKLERTVYADLIPDWQASK

SEQ ID NO: 615 - DNA, 1452 bp, Myceliophthora thermophilia
  CDS (1)...(1452)
atgcccagcaaaggggtccacgtcttcacctacattgcagcgcacggctgctccatcgagctgtcggtaccgggacggactgttacggttaaggagctgcaccgcttctcggacgtcgcgctcgaggtagagtcgtcggagatcaaaagcctcttcgataagcgaggcaagttcatcttcaaggtcttccggaatggtaaacagatcacggagcaatggatcgacgtgaatgccatcacgggtaacgccagtggtggcaccatggagtccattgccgacacaccctccatcttccacgacgacctcatcgtctcgtacggcctgtacgaggccggcaagggccatgacctactgcccaatcgctaccagtgcttcgtcaccgtcagccccaatcatcgtctctgctacgtcaccgtcagccccaattatgaacggtggatggccaagctggcgcccccgggctccgagctggagaagaagcccttccgccggctcgttctgccctcggcccacgatgtgggcatgaacagcatggaaagcagcgacgcggtgctgcggtgcgtcggcggcgccgtcgtcggccaactcatcaacgacaaccgcgtcctgaccaagctcgccgacaagttgtcggccgacgccattgccctcatcgcgcccaacatcatctacagcctggccatcacccagaaagactccctcgaggccatgctcaagatcggcgcccgctacttcgagttccgccccgcgcgcctccacaccgccgtccgttccaagggcgccctccccgaccgcctgtacttccagcacagcgccatcccgggcatggcgtacgacgcctttctggccggcgtcgtgtccttcttgcgcgcccacccggccgagatcatcgtggtgcagctgcgctgggacggcgtgcccgacgcgtgcgccaagccgttggccgaggagaagaagcgctacctcgaggacgcgctgcgcccggccaagggcgagatcgtggccggcaacctgcaggacatgaagaagctgaccatcgagcagctgcgccgggaccgcaagcgcctcatcatgctcgacagcgtcgactcgctgtccacgtacacggacgagggcaacgccaccctcaccggggacagcatcctccaggccctgccccgcgtgctgacgcgggagaaccagcggggcaaggcatttattaacatccagtgccaggcgacagcctccaacatcacaaaggcggtcgtctactctgttctggaagccggcgccaccactagctgcctgttggcgaccaagggcttgtgcgaccacaagacgctgccctggtgcagggataacgtcctacgcacctgtgatccggaccagctggtcgtcctgatgaacgattttatagacggcgccacggctgacgttgccgtgcagctgagcagacaacggctggagaagtga

SEQ ID NO: 616 - protein, 483 aa, Myceliophthora thermophilia
MPSKGVHVFTYIAAHGCSIELSVPGRTVTVKELHRFSDVALEVESSEIKSLFDKRGKFIFKVFRNGKQITEQWIDVNAITGNASGGTMESIADTPSIFHDDLIVSYGLYEAGKGHDLLPNRYQCFVTVSPNHRLCYVTVSPNYERWMAKLAPPGSELEKKPFRRLVLPSAHDVGMNSMESSDAVLRCVGGAVVGQLINDNRVLTKLADKLSADAIALIAPNIIYSLAITQKDSLEAMLKIGARYFEFRPARLHTAVRSKGALPDRLYFQHSAIPGMAYDAFLAGVVSFLRAHPAEIIVVQLRWDGVPDACAKPLAEEKKRYLEDALRPAKGEIVAGNLQDMKKLTIEQLRRDRKRLIMLDSVDSLSTYTDEGNATLTGDSILQALPRVLTRENQRGKAFINIQCQATASNITKAVVYSVLEAGATTSCLLATKGLCDHKTLPWCRDNVLRTCDPDQLVVLMNDFIDGATADVAVQLSRQRLEK

SEQ ID NO: 617 - DNA, 1260 bp, Myceliophthora thermophilia
  CDS (1)...(1260)
atgctgccgcgcgagctgggcggcgtcgtcgctccggacctcagagtgcacggcgccgaggggttgagaatcgtggacacgagcgtgatgccgctgctgccggcggcgcacctaagcgcgacggcttacccaccactagccaccgactcgtcagggcccagcactcgtccagcagcaacaacaacagcagcagcagcagccacccgtgaggcgtcagcatcgtccgctttcttggccgctgccatcaacaccagcaatgcaagcgacgcgagccctgtcgccggcgttcctcttcccgacattgcaagtcgaggacgcacgtcgccagacaatgcgggcaacaacacttaccccgaggtcaacttgggccacatggagttgctcatccgtttcaactttgaagaacacgcccccgaactgaatgttgagatgcacgactttgcctcaaaactcctgttcaagtgtgcgctggaggctccttacctgatgcaccagatcctcgccatctcagcccggcgtctagcagtactacaaccggagcgctccgaacacctcctcgaaaccgctatacacctgcagaccagagccgtctccatctacaacgaaacggcggccaggtctcaaatagaccagagcaactgctctaccctgctcttgttctgctcccttctcggtcgtcacctgctagctgaccttctggcgagacgagacgccgactttggcgacttcttggctcgctttctggaattcctctcaatctctcgaggcctgatggctatgtccgtcgccgcctgggacctcttgcttcaatccgatatcaaacatcttgttctttgggcactcgagatctcccaatcgacaccccagggccatcattgcgatgaattgcagcgcctcgtcctcgagtcgagtgaactggatgaatcgtccaaggaagcctgcgttgcggcaatcgcctaccttcaggtcggctttgacagtctgctgggaggtgatacccgaaaccagcggtacctgatggttttcatgtgggcgcccgctgtaccgcaaaaatttaccgacttgttgtcccaacggcgccctgaagcgatcgctatcatggcccactgggcactccttctccatcatacccgggcgctctggcacgttgccgactccggctcgcacctgctgagaagcattgccgacttcctcgggcctagctgggagccttggctgtcgtggccgctttccgttctttctgcgaatgctgccaagtag

SEQ ID NO: 618 - protein, 419 aa, Myceliophthora thermophilia
MLPRELGGVVAPDLRVHGAEGLRIVDTSVMPLLPAAHLSATAYPPLATDSSGPSTRPAATTTAAAAATREASASSAFLAAAINTSNASDASPVAGVPLPDIASRGRTSPDNAGNNTYPEVNLGHMELLIRFNFEEHAPELNVEMHDFASKLLFKCALEAPYLMHQILAISARRLAVLQPERSEHLLETAIHLQTRAVSIYNETAARSQIDQSNCSTLLLFCSLLGRHLLADLLARRDADFGDFLARFLEFLSISRGLMAMSVAAWDLLLQSDIKHLVLWALEISQSTPQGHHCDELQRLVLESSELDESSKEACVAAIAYLQVGFDSLLGGDTRNQRYLMVFMWAPAVPQKFTDLLSQRRPEAIAIMAHWALLLHHTRALWHVADSGSHLLRSIADFLGPSWEPWLSWPLSVLSANAAK

SEQ ID NO: 619 - DNA, 1161 bp, Myceliophthora thermophilia
  CDS (1)...(1161)
atgcagctcctgagggacatccatgcaagctggctgcttgccgtcctggtctggtctagcagtctggttagcgcacgcccgcatcagcagcgggcgccccttgtaaggaaggaatggcgcaccctctcgaaggatgagaagtcttcctacctctctgcgcagactttcgacatccactacacgggtcactttctcgcctgccacaggtactacctcgccgtctacgagcgcatgcttcgcgacgagtgcggctacaagggcgcccagctctactgggattggaccctcgacactccggctgacaagaagtccggaccgtcaactgtggaagtgcggcccctcgatggtagccccctcttcaacgtctcggtgaagaatgaagtgattctcccggctggtgtgttcgggacaccggcaatcctgcagaggagcggcgttgggccggctcccttcttgcgcagcgcaaagatcccgttggtcctcgacctgccgggtgttggctccaatttgcacgatcactccggccctgcggttatttggaactacaccaaaccgcttccgttctaccttctcccgtcggacatgttcaaagaaacgttcgccgccgaggccgcggcggccttcaaccaaaatccagctcagggcccgtacaccctcgccatgtccaacagcgcgatctgggtgccgctccccgacataacggccgactacccggtcatcgtcaaccagatccgcgccctcgccaactcgtccgacccctcggagccccggctgcccctggccttcgacggcgacgaatcgctcgtggaaggctaccgggcccaactccgccagctggccgacctgtacgccaacccgcgctccccgagcctcgagagcgccgtatcgacggacaacacggcctcgccggtcctactgcaccccctcagccgcggcacggcccggctcaatctcacgcaccccttcgagccgcccgtgctggactaccggtcggcgcccaacccggtcgacatggccgtccacgtcgcgcacacgcgctttatacggcgcacgctgggcacgcgcgtgctccagaagctgggcgcggtcgagggggaaccgggcgccgacgtcgcgtcgtcggacgaggagctggaggcgttcgtgcgccggtccacgtaa

SEQ ID NO: 620 - protein, 386 aa, Myceliophthora thermophilia
MQLLRDIHASWLLAVLVWSSSLVSARPHQQRAPLVRKEWRTLSKDEKSSYLSAQTFDIHYTGHFLACHRYYLAVYERMLRDECGYKGAQLYWDWTLDTPADKKSGPSTVEVRPLDGSPLFNVSVKNEVILPAGVFGTPAILQRSGVGPAPFLRSAKIPLVLDLPGVGSNLHDHSGPAVIWNYTKPLPFYLLPSDMFKETFAAEAAAAFNQNPAQGPYTLAMSNSAIWVPLPDITADYPVIVNQIRALANSSDPSEPRLPLAFDGDESLVEGYRAQLRQLADLYANPRSPSLESAVSTDNTASPVLLHPLSRGTARLNLTHPFEPPVLDYRSAPNPVDMAVHVAHTRFIRRTLGTRVLQKLGAVEGEPGADVASSDEELEAFVRRST

SEQ ID NO: 621 - DNA, 1521 bp, Myceliophthora thermophilia
  CDS (1)...(1521)
atggccagacgcccatcgacccgacaatcgattcgaaaggcggcacaatcaaaggctgcagcgaccgagtccgagactcgtgcgggacaagaggtcgtttccgcgacttcggtcgaggtcaacggcacagtagtgacgacgacgaggacgaagacgacgacatccgccgccgatgccaaggtcgatgtgaaggtcgatgtgatcaagacgaaggcctcgaagcgcaagaccgctgccgccgagccggatctcgacggcgaggatatcgaaaacaccagcccggccgaggacgcaaacagccgcgaaagccaagaaacaaaaaagaagccggcggccaaaaagcgcaaaacggccaacaccaccaccgccaacaccgccaaggaggaggccgagggcatcaccatgccgctggcaccccgaacggccgtcgcgtcgctgaagcgggccatgtacatcggcgcccacgtgtccggggccgggggcgtccacaactcgatccagaacgccgtccacatcggcgccaatgcgttcgcgctcttcctcaagtcccagcgcaagtgggtgaacccgcccctggccgacgaggccaagacccagttccgcgccctgctcggcgaacacggctacgacgccggcaagcacatcctcccgcacgggccctacctcgtcaacctcgcgcagcccgacgaggccaaggcggcccaggcgtacggcagcttcctcgacgacctgcagcggtgcgaggccctgggcatcgccctctacaacttccacccgggctcgacggggggggagccgatggcgtcggcgtgcgcccgcatcgccgcgcagctgaaccgggcgcacgcggccacctcgtccgtcgtcacgctgctcgagaacatgtgcggcagcggcaacgtggtcggctcgcgcttcgaggacctgcgcgacatcatcgccctcatcgacgacaagtcgcgcgtcggcgtctgcatcgacacctgccacgccttcgccgccggctacgacctgcgcaccccggacgccttcgcccgcaccatggccgagttcgactcggtcgtcggcctccgctacctgcgcgccctccacctcaacgacagcaaggcccccttcggctcccaccgcgacctgcacgccaacatcggcaccggcttcctcggcctgcgcgccttccacaacatcatgaaccacgagctgctgcagggcctgcccatggtgctcgagacgcccatcgaagagaaggggcccgacggcaagacggtggagaacaagcagatctgggccgacgagatcaagctcctcgagagcctgatcggcatggacgtcgagagcgccgagttcagggacaaggaggccgagctccaggcgaggggagcctccgagaggcagaagattcaagaccaggtcgacaagaaggccgagaaggacgccaggaagggtgccaaaaggggcccaaaggcgaaaggcaagggcaagggtaacaagaaggacgaggactcgtacaccgagagcgactag

SEQ ID NO: 622 - protein, 506 aa, Myceliophthora thermophilia
MARRPSTRQSIRKAAQSKAAATESETRAGQEVVSATSVEVNGTVVTTTRTKTTTSAADAKVDVKVDVIKTKASKRKTAAAEPDLDGEDIENTSPAEDANSRESQETKKKPAAKKRKTANTTTANTAKEEAEGITMPLAPRTAVASLKRAMYIGAHVSGAGGVHNSIQNAVHIGANAFALFLKSQRKWVNPPLADEAKTQFRALLGEHGYDAGKHILPHGPYLVNLAQPDEAKAAQAYGSFLDDLQRCEALGIALYNFHPGSTGGEPMASACARIAAQLNRAHAATSSVVTLLENMCGSGNVVGSRFEDLRDIIALIDDKSRVGVCIDTCHAFAAGYDLRTPDAFARTMAEFDSVVGLRYLRALHLNDSKAPFGSHRDLHANIGTGFLGLRAFHNIMNHELLQGLPMVLETPIEEKGPDGKTVENKQIWADEIKLLESLIGMDVESAEFRDKEAELQARGASERQKIQDQVDKKAEKDARKGAKRGPKAKGKGKGNKKDEDSYTESD

SEQ ID NO: 623 - DNA, 906 bp, Myceliophthora thermophilia
  CDS (1)...(906)
atgtcttcaagactaccttcgagcgcgagccgctggacttgggctctcccgttacggacccccaatcgcctcactcgggcatccttctcccggttcatcgcgactgctgctggtgcatcctctcccacggccaccacaacccccttgatacgccgtgctgcatcgattaccggtcgcgtcctcctctttaccacgctcggctttgccatggcagcggcaccagcctacaagtcggcagtcgaagtcctgtcccctccaagcgatgccgacgcactggaatcatttcttccgcaggacgacgaggcgaaggccaaggaggactatattaactcgcacccacttacggcggcgcttcgggcggacccgaacttgatcgagtcgcgccctcacatgaagataccggcgtcatggcgcaagcataacctgaccgggggcactcttattgggccgggcaagatggtcacgccgccatttagctggacagatagagaggggaggagatacgtgcagatcgcccacgtgggaacggatctctgcggccacatgggcgtgatccacgggggattcttggctaccatgctggacgagggactggcaaggtgttgctttcccgtcttaccctacaatgtgggtatgacggccaagctcgagatcaactataaggcccccgccatggctgatcagtaccttgtgcttcgggcgacaactatcaaggtagagggtaggaaagcatgggtcgagggtcagatcgagaccctaccggaagatgaaaaccaacaaccaaccgttctggcgacggctagcgcactttacgtctcgcccaaacaggcgtcggtgcgtaccctgctcatccccaaccacacagccatccgcccaacctttcttgagaagcatgggtttcgctga

SEQ ID NO: 624 - protein, 301 aa, Myceliophthora thermophilia
MSSRLPSSASRWTWALPLRTPNRLTRASFSRFIATAAGASSPTATTTPLIRRAASITGRVLLFTTLGFAMAAAPAYKSAVEVLSPPSDADALESFLPQDDEAKAKEDYINSHPLTAALRADPNLIESRPHMKIPASWRKHNLTGGTLIGPGKMVTPPFSWTDREGRRYVQIAHVGTDLCGHMGVIHGGFLATMLDEGLARCCFPVLPYNVGMTAKLEINYKAPAMADQYLVLRATTIKVEGRKAWVEGQIETLPEDENQQPTVLATASALYVSPKQASVRTLLIPNHTAIRPTFLEKHGFR

SEQ ID NO: 625 - DNA, 2082 bp, Myceliophthora thermophilia
  CDS (1)...(2082)
atgagtggccgtggtgggagccgcgagagcggcgatggtgctgcagcaagtgatagcgatttggagaagaagggaagggacggggacggggacggccggtcgtctcacagccctcactattacgatgacgggctgttgtcccctgctaaccggcggctgccggactacaaagatgggcaatgggcagggccgctctcgcccgtgacggccgcgcgggaggagggtgtcggcgccgggccggcggtggtgctggtcctgtcgatcgtcttggtgctggtcgtccaggtcggtgtttggtgggtattgctgatgggcatgggctttggttccgaggatgggcgaaccgttgtcggtacagtgagagtcgacctcaactatacctcttatgaggggttgagactctcaaactgggtcaattccttccgaggcatgcgctatgctgccgcgccgataggggacttgagatggagggctccgcttgatcctattccgtctgacacggggacggtcgagaaggctgcagcgttccctcccaggtgtctcggtatcggctcagcctatcctacggatgatgagagcgaggattgtctgtttgtgaatgtctgggctccgacaaacgcgactgtgaagtctaagctgcccgtgtgggtgttcattcagggcggaggctacgtagccaacaccaacgcctactgggacggggctgaggccgtcgagaaatccggccacaacgtcgtcatggtcagcttcaactaccgtgttggcctctgggggtttctcgcgagcgagcgggtgagggacgacggggtcttgaacgtcggtttgttggaccagcggatgctgctgaaatgggtgaaaacgcacatcgcttcgtttggcggcgacccggaccacgtcgtcatccacggcgcctctgccggtgccggctccgtcgccatgcacctcatagcctacggcggccgtaacgacaacctctttatcggaggcatgaccgagtccctcttcttcccggcccagccctttgtccacgagctcgagtaccagtttgaccgagtggtgagccagacaggttgcgacggcgtagccccggaccggcagatggcctgtttacgctctaaggacgttgccgtactgcaggctgctaattacgcccagccgttccccggccgcccggacccgcccatgcccctgttctactggacgccctgtgtcgacggggatctcttgcgtgacctgccctaccgtctgttcgaaaagggacagttcatcagcgtgccggtggtgtttggcacatcaaacgacgagggctctgtcttcgtccccgacgccgacaccccctcggacgttgcccacttcctccgcaacaactaccccctcctcacggccaacgacaccaccgacatcctcacccactacccccaactgccgcccgtaccagcccataaaccctggttccccactgccagcaaagcctacggcgaagcaaccttcatctgcccaacaaacaatctcctctcttcataccctatccgccccccacaagtgaaaagcaacacaacagccgccaagacattcccttttccctcctcctcctcctcctccccttcctccccgtctccctcctctttcccctccaagaggacgaagaagaagaagagtaggacagaggcggaagccgcaggcgcggccgccgccctctacacctaccggtacaatgtccgcgacgaggctaccgtcgcccgcggcctcggcgtcccccacctctctgacgcacccgccatcttcggccccgggaacgtgcccgggcaggaagcggccagttacgagacgtacaacgccgctgttgtgccgctcgtcatgggctactggctcagcttcgtgcgcacgctcgaccccaacgtgttccgcgcgcccgggtcgccgagatgggagcccgtctggcaggagggaggcgatgccggagtgatgaggaggttgctgatcgagacggagggggcgaggatggaaacggtagacgcggccgagagggggaggtgcgggttctggaaagagttgggttcgggaaggatgaggcagaagtga

SEQ ID NO: 626 - protein, 693 aa, Myceliophthora thermophilia
MSGRGGSRESGDGAAASDSDLEKKGRDGDGDGRSSHSPHYYDDGLLSPANRRLPDYKDGQWAGPLSPVTAAREEGVGAGPAVVLVLSIVLVLVVQVGVWWVLLMGMGFGSEDGRTVVGTVRVDLNYTSYEGLRLSNWVNSFRGMRYAAAPIGDLRWRAPLDPIPSDTGTVEKAAAFPPRCLGIGSAYPTDDESEDCLFVNVWAPTNATVKSKLPVWVFIQGGGYVANTNAYWDGAEAVEKSGHNVVMVSFNYRVGLWGFLASERVRDDGVLNVGLLDQRMLLKWVKTHIASFGGDPDHVVIHGASAGAGSVAMHLIAYGGRNDNLFIGGMTESLFFPAQPFVHELEYQFDRVVSQTGCDGVAPDRQMACLRSKDVAVLQAANYAQPFPGRPDPPMPLFYWTPCVDGDLLRDLPYRLFEKGQFISVPVVFGTSNDEGSVFVPDADTPSDVAHFLRNNYPLLTANDTTDILTHYPQLPPVPAHKPWFPTASKAYGEATFICPTNNLLSSYPIRPPQVKSNTTAAKTFPFPSSSSSSPSSPSPSSFPSKRTKKKKSRTEAEAAGAAAALYTYRYNVRDEATVARGLGVPHLSDAPAIFGPGNVPGQEAASYETYNAAVVPLVMGYWLSFVRTLDPNVFRAPGSPRWEPVWQEGGDAGVMRRLLIETEGARMETVDAAERGRCGFWKELGSGRMRQK

SEQ ID NO: 627 - DNA, 1413 bp, Myceliophthora thermophilia
  CDS (1)...(1413)
atgcgtcttcccgctaccactatcctcgtgctggccgccatccttggggacctcgcggtggccgttcccattcaggacagcccaagacagcggcttctggacggcaaaccgctgccggccaagtaccgcaagaacccacccccgccatacacgcctgaacaccgagacccctacgatagtgccgtggacgccattggagagaaactcgaccccttgccgtaccgcaatggtgacggagcctctgtcctgggcccttggaaccgggagcgggcccgtcagaacccggatatcgtgcggccgccgtcgacggaccacggcgacatgctgaacctgagatggagctttgccgactcccacataaggatcgaggaaggaggctggacccggcagaccacggtccgcgagctgcccgccagcgtggagctcgcgggcgtcaacatgcggctggacgagggagtcatccgagagctgcactggcacaaggaggccgagtggggctacgtgctcgcgggccacgtgcgcgtgacggccatcgactacgagggcggcaccttcatggacgacctcgccaagggcgacctgtggtacttcccgcccggggtgccgcactcgctgcagggcctcggcgccaacgggaccgagttcctcctcatattcgactcgggcgacttctcggaggagtcgactttcctgctgaccgactggcttgcccacaccccgcggtccgtcctgtccaagaacttccacctgccgcccgagatcttcgcccacgttcccgcggcggaacgctacatcttccagggatcccgcccgtccgactcgctgcgggacgagttccccgccgggcggcacgtcaagaagtcgaggcagcagttcacgcaccggctgctggcgcagccgcccaagaacacgacgggcgggcgggtgcgcgtggtcgacagcgcgaccaactttcccgtgtccaagacggtggcggcggcgcacgtcgtcatcgagcccggcgcgctgcgcgagatgcactggcaccccaacgccgacgagtggtcgctcttcctgcgggggcgcgcccgcgtcaccgtcttcggcgccgagggcagcgcccgcaccttcgactaccagcccggcgacgtcggcatcgtgcccaagaacatgggccacttcgtcgagaacgtgggcgacgaagaggtcgagatgctcgagatcttccgcgccagcgagttccgcgacttctcgctcttccagtggctcggcgagacgccccggcgcatggtggccgacaccctgttccagggcgacaaggaggccggggagaggttcctcaaggagattaaggatgccaaaaaggacgaagtcaccatgccacccgctgacgatgatgacaaggatcccgggtccatgtgggatgatttgtaa

SEQ ID NO: 628 - protein, 470 aa, Myceliophthora thermophilia
MRLPATTILVLAAILGDLAVAVPIQDSPRQRLLDGKPLPAKYRKNPPPPYTPEHRDPYDSAVDAIGEKLDPLPYRNGDGASVLGPWNRERARQNPDIVRPPSTDHGDMLNLRWSFADSHIRIEEGGWTRQTTVRELPASVELAGVNMRLDEGVIRELHWHKEAEWGYVLAGHVRVTAIDYEGGTFMDDLAKGDLWYFPPGVPHSLQGLGANGTEFLLIFDSGDFSEESTFLLTDWLAHTPRSVLSKNFHLPPEIFAHVPAAERYIFQGSRPSDSLRDEFPAGRHVKKSRQQFTHRLLAQPPKNTTGGRVRVVDSATNFPVSKTVAAAHVVIEPGALREMHWHPNADEWSLFLRGRARVTVFGAEGSARTFDYQPGDVGIVPKNMGHFVENVGDEEVEMLEIFRASEFRDFSLFQWLGETPRRMVADTLFQGDKEAGERFLKEIKDAKKDEVTMPPADDDDKDPGSMWDDL

SEQ ID NO: 629 - DNA, 654 bp, Myceliophthora thermophilia
  CDS (1)...(654)
atgtttctgaagtttctgaccgttcctgttactctgatgtccctcatatcgatggcgacggcactcagcattcccgcccagctgcagctggccgacaccgctgtcgatagatataagattctccgcaacgacaaggactttgtctttgactttgacaaggctactttccctatggccaaccgaaagacctttcccgctctcgtcgggacgaacctggccttggccattgcagaaatcgaaggctgcagcatggcctcgctccacatccacccgcgctcggccgagatcttcgtcgtgctctcgggccgcgtcgtgaccgagatgatccccgaggccggcgtgctcggggccgacggccggccgcgcaccatccgcaccgagctggccgccaaccagacgaccatcttcccccagggctccttccacgcgcagtacaacccggactgcggccccgcgctcgcggtcgccgccttcagctctgacgaccccggcgccgccctggtcgtgcctcaggcctttgagcagaccgacgacttcgtcgtcaactcgttcggcggcgccatctcggccgcggaccttgccaggttcagggccgccatccctcagggggccatcttcgacgtcgaggcctgccggaagaagtgtgggctgtag

SEQ ID NO: 630 - protein, 217 aa, Myceliophthora thermophilia
MFLKFLTVPVTLMSLISMATALSIPAQLQLADTAVDRYKILRNDKDFVFDFDKATFPMANRKTFPALVGTNLALAIAEIEGCSMASLHIHPRSAEIFVVLSGRVVTEMIPEAGVLGADGRPRTIRTELAANQTTIFPQGSFHAQYNPDCGPALAVAAFSSDDPGAALVVPQAFEQTDDFVVNSFGGAISAADLARFRAAIPQGAIFDVEACRKKCGL

SEQ ID NO: 631 - DNA, 1128 bp, Myceliophthora thermophilia
  CDS (1)...(1128)
atggcacgtctcaccctcgcggggctgcttgcagtcccctggctcctgctcccgggcctcgtgtccggcgacgcagtcttggatctccaggaaaagggtcgtcccgccatcgatgctcaactggccaagtcgacgacatgcaccaaagagaaactccaggtccgccgcgagtggggcgacatctcggccgaagagaagaaggcctacatcgccgccatgctgtgcatcatggagaagccgtccaggttggacccgaaccagtttcccggcgccaagtcacggtacgacgacttcgtcgtcgttcacatgaaccagactctgtccatccacggcacgggcaacttcctctcgtggcatcgctactacacctgggtgtttgagcgcgccctccaggaggagtgcgggtataacgggacccagccctactgggactgggggcgctgggccgacgacccggagaactcgcccatctttgacggcagcgacacctctctcagcggcaacggcgagtacattgagcacagggcctcgggcttcatacccgccggcaacggaggtggctgcgtcaagtcgggtcccttcaaagacatggtcgtccacctgggccccgtcgctcccgccatcgacccggcgccgccggcgaacccgcggcgcgacgggtacggcgacaacccgcggtgcctgcggcgtgacatctcgaaccagctgtcgagcaagtacgcgcggacgcaggacattgtcgacctgatcacgacgtcggccgacattggcaccttccagacggtcatgcagggcgccggcggcttcggcgtcggccccggcggcatgggcgtgcacgccgccggccacttcaccatcgccggcgacccgggcggcgacttctacacctcccccaacgacccggccttctgggtccaccacggcatgatcgaccgcacctggaccatctggcagagccaggacctcgacaaccgcctccaggtcatcgccggcggttccagcatgatgggcggccctccccagaccctcgacgaccccgttgacctcggcgtcgtcgccgacaaggtctatcccatcagggacctggtcagcgtcgtcgacgggcccttctgctacgtctatgagtga

SEQ ID NO: 632 - protein, 375 aa, Myceliophthora thermophilia
MARLTLAGLLAVPWLLLPGLVSGDAVLDLQEKGRPAIDAQLAKSTTCTKEKLQVRREWGDISAEEKKAYIAAMLCIMEKPSRLDPNQFPGAKSRYDDFVVVHMNQTLSIHGTGNFLSWHRYYTWVFERALQEECGYNGTQPYWDWGRWADDPENSPIFDGSDTSLSGNGEYIEHRASGFIPAGNGGGCVKSGPFKDMVVHLGPVAPAIDPAPPANPRRDGYGDNPRCLRRDISNQLSSKYARTQDIVDLITTSADIGTFQTVMQGAGGFGVGPGGMGVHAAGHFTIAGDPGGDFYTSPNDPAFWVHHGMIDRTWTIWQSQDLDNRLQVIAGGSSMMGGPPQTLDDPVDLGVVADKVYPIRDLVSVVDGPFCYVYE

SEQ ID NO: 633 - DNA, 1104 bp, Myceliophthora thermophilia
  CDS (1)...(1104)
atggctgaccgtccaacattgctccggccgcctcctgaggaccccgacaaggcgcagatcgaaaatgccttggaggtgatcgagctggccgtcctgggtcctaacatcttcaccaacgcccgccagccctggcaccccccgggagcccgcggcatctatggcggcgccgtgatcgccatgtgcctggccgcggcgcagcgcaccgtcgcgccggatttcctcgtccactcctgccactgctacttcctcctggccggctcctccgagctgcccatcctcttccacgtcgagcaggtccgcgacggccgctccttcgccacccgcaccgtccaagcccgccagcgcggccgctgcatcttcaccaccaccatctcctttgtccgggacacccccacctccaccaccagcagcagcagcagcagcagcagcagcaacgacaacgggggcgtccgcaccgtcagccacgcgagcgagatgccgcgcgggccggacggccagccgctgcggcctcccccggacgactacgccgacgagccggaggtgatggcgcagggcccgttccaggggaccaagatcgagatcgtcagcgacggggcggacggcggcgacaaggccgggtccaagaagacgcggcagtgggtgcgggcgcgggggcggatccgcggcggggtggcggcgcagctggaggcgctcgcgtacgtgtccgacagctacttcatcggcaccatcacgcgcatccaccggctctggcggttccccttcccgcccgaggagtacgaccgcctgccggccgacctgcaggccaagatccgcaccgtgcaccagtgggagggcatgggcgacgacccccgcgagatggccggccgccccgtcatcggcatgatggtcagcctcgaccacaccatctacttccacgaaccccgccgcgtccgcgccgacgagtggatgctgaccgagatggagagcccctgggccggcgacgagagggccgtggtcatgcaaaagatcttcagcaaggacgggacgctgctcgcgacctgcgtccaagaggggctcgtccgtctccagcagcccgctgccaagggcaacgagtcgaaattgtaa

SEQ ID NO: 634 - protein, 367 aa, Myceliophthora thermophilia
MADRPTLLRPPPEDPDKAQIENALEVIELAVLGPNIFTNARQPWHPPGARGIYGGAVIAMCLAAAQRTVAPDFLVHSCHCYFLLAGSSELPILFHVEQVRDGRSFATRTVQARQRGRCIFTTTISFVRDTPTSTTSSSSSSSSSNDNGGVRTVSHASEMPRGPDGQPLRPPPDDYADEPEVMAQGPFQGTKIEIVSDGADGGDKAGSKKTRQWVRARGRIRGGVAAQLEALAYVSDSYFIGTITRIHRLWRFPFPPEEYDRLPADLQAKIRTVHQWEGMGDDPREMAGRPVIGMMVSLDHTIYFHEPRRVRADEWMLTEMESPWAGDERAVVMQKIFSKDGTLLATCVQEGLVRLQQPAAKGNESKL

SEQ ID NO: 635 - DNA, 2280 bp, Myceliophthora thermophilia
  CDS (1)...(2280)
atgtcgctgcagccgttgaaaacgaccgccgtcggcggccgcgacccctcgctcctctcgccctccgaatacgacgccgacgccatttccattcgcagcgaccaggacaccgacagcgatgacgacgagcgtcagcttcgtgcgaggaacagccgcgagctccgcgcgcacgacaggctggtgctgatggaggaggaagagctggaccacttggtcatcgaaaaccggaggaagcaggaacgccagcgtaggggttccgggctgccgatacccaacccgctcaggttgttgaccaggcggctcagtgacgtatcaccatcgtcgtcgaggagcccgtctgtgcagccgggcgagtcggttgacgaccttagggcagaaaagaggcgggcgaggcggcagaggagagagatgaagcgagatcggctgctggctgatgcacagcacggcgaggacggcgagctcatgtacgagatggaagagggcggcatgaaggagggcagctcgaccggcgaaagcagcgaacgagaggatagcgacgaggtcgaccggaagcacttgctgcatgttaccgataccaagtcgaagcgaaaacgcaactgttgccgttgggtgttgttttacgccatcattgccgtcgcctttgccatcctcgtccttgtggcgtggaaggtatccctggatcggaagacgacgcgttatagccagaaactcgtcagcaacggcaccgccatgttcgcacccaccacaatcattatcagcttggacgggttccgggccgattttctcaatcgggggttgacgccgaggctcaacgccctcgttaaggagggcgtatcacccctctatatgctcccgtcttttcctagtgtcacgtttcccaaccactacacgatggctacagggctctacccggagtcccacggcgttgtgggcaacagcttctgggacccgatgttgcgggaagagttttattatacggacccttcgcggagcatggatcccaagtggtggaaaggtgaacccttttgggttacagcgcagaagcaagggctcaagaccgccatacacatgtggcccggcagcgaggcaaacatcctcaatgttgaccccacgtatttggacaagtacaacggaaaagagctgttgccgaagaaggtggacaggattcttgagtttttggacatgccggactcggaccggcctcaaatcatcgcggcgtatgttcctaacgtcgatgctgacgggcacaagtacgggccgaatagtactgagatccggtccaccatccagaaggtggacaagatgctggacgacttgttcaaggggctagaagaacggcatctggcggacattgtcaatatcatcgtggtttctgaccatggcatggcgactacggacgtctcccggctggtacagctcgaggatctggtggacctgagcaagatcgagcacacggacggctggccactgatcggattaaggccaaaagatcccgctgatctcaaggacatatacaatgggctgatcgagaaaacgaaggggaaccccaacctcgaggtctacctccgcgacgttgacatgccagcacggtatcacttttctaacaaccagcgcattgctccgttgtggatcgtgcctaaggcgggctgggcgctggtcaagatggacgagatgaacttgaaagaggcacaggctcaaggggcggtgtatcatccgaggggccttcacggctatgatcatgaacatccgctgatgagggcaatattcatcgcccgtggcccggctttcccgcaccagccaaacagcaaactcgaggtattccaaaatatcgaggtttacaacatgctgtgcgactccgtagggatcgagccagcgcccaataacggcacccttcggctgcccctcaagccaatcgggctgcatgatgactcggccacggacggcctggacacgccagccgatcccgtggaggctcacaccatttcaaccgcttctacaagcagcgctcagacgagcgtcccgtcgaagtccgttggcgttgaccagccggtgccgccgccgcggccgacccaggcgccctcgggctcggacaatggcggcgaaagtgacagtgacgatgacgacgaccacaaggatgattcctcggccgtcgacaatgccgagtcgaaagttaaggagttttgggattggttcaccggaaaggtgagcacctggtgggggaaagtgacgggtaacggcaaggaaggtgaggatggtggcaaagacaattcctccggatag

SEQ ID NO: 636 - protein, 759 aa, Myceliophthora thermophilia
MSLQPLKTTAVGGRDPSLLSPSEYDADAISIRSDQDTDSDDDERQLRARNSRELRAHDRLVLMEEEELDHLVIENRRKQERQRRGSGLPIPNPLRLLTRRLSDVSPSSSRSPSVQPGESVDDLRAEKRRARRQRREMKRDRLLADAQHGEDGELMYEMEEGGMKEGSSTGESSEREDSDEVDRKHLLHVTDTKSKRKRNCCRWVLFYAIIAVAFAILVLVAWKVSLDRKTTRYSQKLVSNGTAMFAPTTIIISLDGFRADFLNRGLTPRLNALVKEGVSPLYMLPSFPSVTFPNHYTMATGLYPESHGVVGNSFWDPMLREEFYYTDPSRSMDPKWWKGEPFWVTAQKQGLKTAIHMWPGSEANILNVDPTYLDKYNGKELLPKKVDRILEFLDMPDSDRPQIIAAYVPNVDADGHKYGPNSTEIRSTIQKVDKMLDDLFKGLEERHLADIVNIIVVSDHGMATTDVSRLVQLEDLVDLSKIEHTDGWPLIGLRPKDPADLKDIYNGLIEKTKGNPNLEVYLRDVDMPARYHFSNNQRIAPLWIVPKAGWALVKMDEMNLKEAQAQGAVYHPRGLHGYDHEHPLMRAIFIARGPAFPHQPNSKLEVFQNIEVYNMLCDSVGIEPAPNNGTLRLPLKPIGLHDDSATDGLDTPADPVEAHTISTASTSSAQTSVPSKSVGVDQPVPPPRPTQAPSGSDNGGESDSDDDDDHKDDSSAVDNAESKVKEFWDWFTGKVSTWWGKVTGNGKEGEDGGKDNSSG

SEQ ID NO: 637 - DNA, 1215 bp, Myceliophthora thermophilia
  CDS (1)...(1215)
atggtgtcgttttcgagcctggccatcctcggcctaaacctagccgcacgagtatcttcaaccattcttcagaatggccaagtaagaaagaccaatttcccagatactcgaattaatccggcagactactcgtttacgacgtacccggccaatgccaccgagatctcgtacaaagggcggtgggactcgaaacatgtctcctggtggtcagcccccggtatcaagtttggctataccggaaagacagtagccatcacctttggcaacctgacggataatggcgttctcgtcggctatcgcattggagggctcgactggatgttcaccaacattacagcaggggctactcacctcctcgtgagcccagaaacgccgggttcaaatgagacaggcccaatcaacccgtggacgtttgagatgcgggtgtcgaattgggcatacggcgtgcaaatcgactccgttcacgttgccgccggggagaagctggtcaagatcccggattttggccgccggatcgaggtaattggcgatagcctcgccgcgggcatgtacacgaccggcctgggagctggcctgggcaacaccgagttcacggtgactgctcagctccgcgagcctcctgacgctgcgacgactctcacacaccatggcacagacgacccagagccctgggactttgcgaaacacccagctgcagacattgtcgtcatcaacatcggcacgaacgacaggaatgaggcgaacaatgtttcgacagaggcctacatcgatgcgttgacaaagatcattgagggcatccacggcaagtggccgaaggcccaggtcatagtcatgtctctctggctcggattctaccagagcgggaacacctacctccccaatgcgccagatggctgggtcaaggaaatctatgacatggttcggtggttcaactcggacgactacctccgcaacccaattatttacgacggcgtcaccaaaaagacatcaagaaccggaaaacgggcaaagccctttgtccactacttcaacacgacaggcatcatgcaacacaacgacattggcccgctgtggcacccgactgatgtaggcgccgtcaaggtggccagtcacctgcagcagttcattcgtatcaagttcgggtgggacttttatgccaccggcccggagatattccacgagaccctgtactggaatgacgagccgaactactaa

SEQ ID NO: 638 - protein, 404 aa, Myceliophthora thermophilia
MVSFSSLAILGLNLAARVSSTILQNGQVRKTNFPDTRINPADYSFTTYPANATEISYKGRWDSKHVSWWSAPGIKFGYTGKTVAITFGNLTDNGVLVGYRIGGLDWMFTNITAGATHLLVSPETPGSNETGPINPWTFEMRVSNWAYGVQIDSVHVAAGEKLVKIPDFGRRIEVIGDSLAAGMYTTGLGAGLGNTEFTVTAQLREPPDAATTLTHHGTDDPEPWDFAKHPAADIVVINIGTNDRNEANNVSTEAYIDALTKIIEGIHGKWPKAQVIVMSLWLGFYQSGNTYLPNAPDGWVKEIYDMVRWFNSDDYLRNPIIYDGVTKKTSRTGKRAKPFVHYFNTTGIMQHNDIGPLWHPTDVGAVKVASHLQQFIRIKFGWDFYATGPEIFHETLYWNDEPNY

SEQ ID NO: 639 - DNA, 1884 bp, Myceliophthora thermophilia
  CDS (1)...(1884)
atgctgatccaggccaacccagccatctccacgacgatccggaacgcttctgattttgtcgacctctgcgctgcctttggatacacagctgaggaacacatcgtgcagaccaaggatgggtacttgctgggactccaccggctggcgtggaagaagggggaggagcatgtccgagcgaaccgcggccccaagagcgtcaagaaaagggtcgtctacctacatcatgggctcctgatgaacagcgaggtctgggtctgcctgaccgacgagcagcggaccttgccgttccgcctggtcgagaagggatttgatgtctggtttggaaacaaccgcggcaacaagtactccaagaagtccatccattcgtcgcctaactccgtcaaattctggaacttctccatcgatgagttcgccttccacgacattcccgacagcatcaactacatcctcgagaccactggccaggagtcgctatcctacatcgggttctcccaaggcactgctcaggcctttgcaagcctggcggtccacccgaggctcaacgatcaaatcaatgtcttcatcgctctcgctcccgccatgtccccggccggcctctccaacggggtggttgacgcgctcgtcaaagcctccccgcaggtccttttcctgctctttggccgccgctccatcctcagctccgccaccatgtgggagtctctgctctacccgccgctctttgccaagctcatcgatctgggtctgtccttcctcttcaactggcgcacccataacatcagcatgtcccagaagctcgccgcctaccctcacctctactccttcaccagcaccaagtcggtcgtccactggttccagatcatccgcaccaagtcattccagatgtacgacgacgacgtcccacccttatcccccttctcctcggccggcagcaggaagtacaccaaggtggctaggtacccgacccgcaacatccgcacgcccatcgtgctcgtctacggcggcagcgactcgctcgtcgacatcaaggccatgctgcgcgagctgccgccccagaccatcgccgccgagataccccactacgagcatctcgacttcctgtgggcacgcgacgtgcacgagcaggtcttcaggcacgtctttgacgcgctcgagagcttcacggggccggagcacacacgcgaggagtacgcgcggtatcagttagccaggcagaattcggatttggcggcacgcgcgggtgcgagtggcggcgggcacggtggtagtgccgtcgggaagaacacgcgggcgcatgtggcaagaggaagcgacgtggcggatagcgacgtcagcacggccgtgggcgggtgtagcacccatgaggaggaagaggaggaggaggaggaagaggaggaggatgacgaagagaacgagagcgaggtgggcggtggcactaccttagcaggcagagctgccggggccagggtcggagcgggtacggagacaggggacagctccggctcgcccctgcgatcgcctagccatgccggcgggcagagcccgttgagggccgtcgccccgcgactgggcgacgcgccgccggtggcggatgcgaacgtcgctgtggagcggccggaggatgccgcgcccccggccgcggcgagcttaccgcgcgtcacggtggcggcacccctcgtttcccagaaggggagcagtcagctgagtccggattcgatgagggacgggaagggcatcagtctgggggctagcaaagcggtgggcggcgtgactaccgggggggttgaggtcggcagattgaagggatcgtcaggaggtgcggccgcggccgcggccgtcaggagccctgccggcgcccggaggcattctgtccgtgccaagaagtag

SEQ ID NO: 640 - protein, 627 aa, Myceliophthora thermophilia
MLIQANPAISTTIRNASDFVDLCAAFGYTAEEHIVQTKDGYLLGLHRLAWKKGEEHVRANRGPKSVKKRVVYLHHGLLMNSEVWVCLTDEQRTLPFRLVEKGFDVWFGNNRGNKYSKKSIHSSPNSVKFWNFSIDEFAFHDIPDSINYILETTGQESLSYIGFSQGTAQAFASLAVHPRLNDQINVFIALAPAMSPAGLSNGVVDALVKASPQVLFLLFGRRSILSSATMWESLLYPPLFAKLIDLGLSFLFNWRTHNISMSQKLAAYPHLYSFTSTKSVVHWFQIIRTKSFQMYDDDVPPLSPFSSAGSRKYTKVARYPTRNIRTPIVLVYGGSDSLVDIKAMLRELPPQTIAAEIPHYEHLDFLWARDVHEQVFRHVFDALESFTGPEHTREEYARYQLARQNSDLAARAGASGGGHGGSAVGKNTRAHVARGSDVADSDVSTAVGGCSTHEEEEEEEEEEEEDDEENESEVGGGTTLAGRAAGARVGAGTETGDSSGSPLRSPSHAGGQSPLRAVAPRLGDAPPVADANVAVERPEDAAPPAAASLPRVTVAAPLVSQKGSSQLSPDSMRDGKGISLGASKAVGGVTTGGVEVGRLKGSSGGAAAAAAVRSPAGARRHSVRAKK

SEQ ID NO: 641 - DNA, 1851 bp, Myceliophthora thermophilia
  CDS (1)...(1851)
atgaagtccttcatcagcgccgcgacgcttttggtgggcattctcacccctagcgttgctgctgcccctccatccacccctgagcagcgcgacctgctcgtcccgatcacggagagggaggaggcagccgtgaaggctcgccagcagagctgcaacacccccagcaaccgggcgtgctggactgacggatacgacatcaacaccgactacgaagtggacagcccggacacgggtgttgttcggccgtacactctgactctcaccgaagtcgacaactggaccggacctgatggcgtcgtcaaggagaaggtcatgctggttaacagaccaacaatctttgcggactggggcgacacgatccaggtaacggtcatcaacaacctcgagaccaacggcacgtcgatccactggcacggactgcaccagaagggcaccaacctgcacgacggcgccaacggtatcaccgagtgcccgatcccgcccaagggagggaggaaggtgtaccggttcaaggctcagcagtacgggacgagctggtaccactcgcacttctcggcccagtacggcaacggcgtggtcggggccattcagatcaacgggccggcctcgctgccgtacgacaccgacctgggcgtgttccccatcagcgactactactacagctcggccgacgagctggtggaactcaccaagaactcgggcgcgcccttcagcgacaacgtcctgttcaacggcacggccaagcacccggagacgggcgagggcgagtacgccaacgtgacgctcaccccgggccggcggcaccgcctgcgcctgatcaacacgtcggtcgagaaccacttccaggtctcgctcgtcaaccacaccatgaccatcatcgccgccgacatggtgcccgtcaacgccatgacggtcgacagcctcttcctcggcgtcggccagcgctacgatgtcgtcatcgaagccagccgaacgcccgggaactactggtttaacgtcacatttggcggcggcctgctctgcggcggctccaggaatccctacccggccgccatcttccactacgccggcgcccccggcggcccgcccacggacgagggcaaggccccggtcgaccacaactgcctggacctccccaacctcaagcccgtcgtggcccgcgacgtgcccctgagcggcttcgccaagcggcccgacaacacgctcgacgtcaccctcgacaccacgggcacgcccctgttcgtctggaaggtcaacggcagcgccatcaacatcgactggggcaggcccgtcgtcgactacgtcctcacgcagaacaccagcttcccacccgggtacaacattgtcgaggtgaacggagctgatcagtggtcgtactggttgatcgagaacgatcccggcgcacctttcaccctaccgcatccgatgcacctgcacggccacgacttttacgtgctgggccgctcgcccgacgagtcgccggcatccaacgagcggcacgtgttcgatccggcgcgggacgcgggcctgctgagcggggccaaccctgtgcggcgggacgtgacgatgctgccggcgttcgggtgggtggtgctggccttccgggccgacaacccgggcgcctggctgttccactgccacatcgcctggcacgtctcgggcggcctgggcgtcgtctacctcgagcgcgccgacgacctgcgcggggccgtctcggacgccgacgccgacgacctcgaccgcctctgcgccgactggcgccgctactggcctaccaacccctaccccaagtccgactcgggcctcaagcaccgctgggtcgaggagggcgagtggctggtcaaggcgtga

SEQ ID NO: 642 - protein, 616 aa, Myceliophthora thermophilia
MKSFISAATLLVGILTPSVAAAPPSTPEQRDLLVPITEREEAAVKARQQSCNTPSNRACWTDGYDINTDYEVDSPDTGVVRPYTLTLTEVDNWTGPDGVVKEKVMLVNRPTIFADWGDTIQVTVINNLETNGTSIHWHGLHQKGTNLHDGANGITECPIPPKGGRKVYRFKAQQYGTSWYHSHFSAQYGNGVVGAIQINGPASLPYDTDLGVFPISDYYYSSADELVELTKNSGAPFSDNVLFNGTAKHPETGEGEYANVTLTPGRRHRLRLINTSVENHFQVSLVNHTMTIIAADMVPVNAMTVDSLFLGVGQRYDVVIEASRTPGNYWFNVTFGGGLLCGGSRNPYPAAIFHYAGAPGGPPTDEGKAPVDHNCLDLPNLKPVVARDVPLSGFAKRPDNTLDVTLDTTGTPLFVWKVNGSAINIDWGRPVVDYVLTQNTSFPPGYNIVEVNGADQWSYWLIENDPGAPFTLPHPMHLHGHDFYVLGRSPDESPASNERHVFDPARDAGLLSGANPVRRDVTMLPAFGWVVLAFRADNPGAWLFHCHIAWHVSGGLGVVYLERADDLRGAVSDADADDLDRLCADWRRYWPTNPYPKSDSGLKHRWVEEGEWLVKA

SEQ ID NO: 643 - DNA, 1983 bp, Myceliophthora thermophilia
  CDS (1)...(1983)
atgcagcgcttctcgtccgccgacttggggacggagcggcgcgagctacttcggactctctccacgctagtcctggtttacaagaccgccgccagcgtcatggttgtccgtcagcccgagcctaagatatgtggtctcccggatgaatatcaaaccacgtacaacatggtctcgggtaacgagcctcctcctcctccggtgaacatatcggatgccgcgagcctggccgcctccggaccctggaaagagcggccttatcgagggcgaggggattcaataggaccctcgcggccttcctcagaacacctctttcccccggtctcttacggactaaaggtgccaagtctgtcgacccttccgccgtctttcttctcccggaccatcacgatggagggactcgcattgattctgctatacctggctgtcccgagccttctattctcggccgtcaagaagctcatgtcgtggagaaagaaccccggacccaaggctcgattccccggaccgcggcagttccccatcttgggtcgcgtacatgacctgccgcgattctcgctctggctgaagttcaaggaatgggccgacatgtacgggccgatctactacacccgggcactggatcaacggttcgtcatcgtcacggacgagaagattgccgaggagctgctggtgaagaggggtcacatctactcgggccggccgcagatccgctcgctcatcaggcacaaggacggtcccgcgtattccgccttgatggaccgccatgacatctggaaggcccagcgcaaatgggtgcacgctgccatggccgaggcgtacaagcagcacttctacgggcacgtggagcgcgagacgaggcggtatttgggcctgctgctcctggacccggcgcggttcctcgactacacgcgcgagtactgcgggcgcgtcatgtcgcggctggcctgggacgacgcgacgcaggggcgggccaacggcgagagcgccgacacgacgctgcactgcatgagcgtgtcgggccccatcaccaacacggccacgcccctgtggcacctgcccgccttcgccaacccctggtaccgcttcgagatccgccgcgagcgcgagcagcgcgcctggtggctcagcaacttccgcctggccaaggaccgcatgcggaggggcgacctgcccggcgacacgtgggcgtaccgctactttgagcaggtcgggagagaggggaacggcgatctcgaccagaccgaggaccaggaggtgtttgcgagctgcatgatcggcttcctcaacctcgtcggggtcattaccatcagcgggcccctgaagttcttcctcatggccatggccctgcatccggactgccaaatcaaggcacaggccgagatcgaccgcgtctgcggcgaccgcatgccgacgatgcaggactttgccgatctgccgacggtccgggcgtgcatgaaagagacggtccggtggaggtcgagtgtgcccttgggtgtccctcatcaagcagagcgcgacgacgagtacaggggggtaaagatcaagatgggaaccgttgtcctcgcctgcgaatgggccctcaaccgcgtgccgagccggtatccggacggggacagcttccggccagagcgttggctagagcccgggtggccgacgtaccaggagccgctgacgcggtaccccaacttccgcgagggccaggcgatgcacacgttcggctggggccgccgcacctgcctgggccagcacctggtcgacgacgagaccttcgtcttcgccgccgccgtcctgtgggcctttgacctccgccccaaggcctgcccgcgcaccggcgaacccgtgcccatcgacagccaggcgaccaacagccacgtcatcctcgaacccaggccgtaccagctcagcatccgcgtccgcagcgccgagcggggcaagcgggtgctggagggctaccgtgaggtcatgggcgagttgaggctctaa

SEQ ID NO: 644 - protein, 660 aa, Myceliophthora thermophilia
MQRFSSADLGTERRELLRTLSTLVLVYKTAASVMVVRQPEPKICGLPDEYQTTYNMVSGNEPPPPPVNISDAASLAASGPWKERPYRGRGDSIGPSRPSSEHLFPPVSYGLKVPSLSTLPPSFFSRTITMEGLALILLYLAVPSLLFSAVKKLMSWRKNPGPKARFPGPRQFPILGRVHDLPRFSLWLKFKEWADMYGPIYYTRALDQRFVIVTDEKIAEELLVKRGHIYSGRPQIRSLIRHKDGPAYSALMDRHDIWKAQRKWVHAAMAEAYKQHFYGHVERETRRYLGLLLLDPARFLDYTREYCGRVMSRLAWDDATQGRANGESADTTLHCMSVSGPITNTATPLWHLPAFANPWYRFEIRREREQRAWWLSNFRLAKDRMRRGDLPGDTWAYRYFEQVGREGNGDLDQTEDQEVFASCMIGFLNLVGVITISGPLKFFLMAMALHPDCQIKAQAEIDRVCGDRMPTMQDFADLPTVRACMKETVRWRSSVPLGVPHQAERDDEYRGVKIKMGTVVLACEWALNRVPSRYPDGDSFRPERWLEPGWPTYQEPLTRYPNFREGQAMHTFGWGRRTCLGQHLVDDETFVFAAAVLWAFDLRPKACPRTGEPVPIDSQATNSHVILEPRPYQLSIRVRSAERGKRVLEGYREVMGELRL

SEQ ID NO: 645 - DNA, 627 bp, Myceliophthora thermophilia
  CDS (1)...(627)
atgtcaacggtcagcacccaggatggcgcgggcgccaatggcgagcacgaggcagtcatcagaaaagaggtgccgtcattcctgaccaggctttcgtacgccggctacatgtacggcttgaagagcatcttggccgccttcttctggctgcgcgagtggaaggaatcccgcaacccgcccgagggcggccccgacattgtgaagacgtacgagtgccggccacatctccctgttcgcatcttctttccatcctcctacgaccagacctcccccgtcgccttgccgaccctcttcaccattcacggcggcggcttctgtgtgggccaccagcgcgacgatgacgagtggaaccgcgctttcgccgattcttactcggtcctcgtcatctcgcttaactactccaaggcgcccacttaccccttccccgcggcgccccacgacgtcgaggccctcctcttggccgcactagaagacgcctccctcccgatcgaccgcggagcccgcgcgccggccagccgcaccgcaatcctgggcttctcggcaggcgggaacctcgccctagctccccgcggtccgcgcctatcccctggcgccgcgcgcggtcataacggtctacggcagccgtga

SEQ ID NO: 646 - protein, 208 aa, Myceliophthora thermophilia
MSTVSTQDGAGANGEHEAVIRKEVPSFLTRLSYAGYMYGLKSILAAFFWLREWKESRNPPEGGPDIVKTYECRPHLPVRIFFPSSYDQTSPVALPTLFTIHGGGFCVGHQRDDDEWNRAFADSYSVLVISLNYSKAPTYPFPAAPHDVEALLLAALEDASLPIDRGARAPASRTAILGFSAGGNLALAPRGPRLSPGAARGHNGLRQP

SEQ ID NO: 647 - DNA, 885 bp, Myceliophthora thermophilia
  CDS (1)...(885)
atgaaggagacacagacgccgacggcgcagatccaggtgcggaacaaccgggcgaaccggctgctttcgtactgctacacgctggtggcgacgccgttcctgctctcgcgctttgcgctcgacgtggtgctgtatctggtgccgtggatgcggccggccagggagtggacgctcaaccaggcggtgcgcgtgcgcgtcgtccgcctcgtcctgctctactggtccctcctgcgctggggggaccgcctgcacctgcgaccgggccgagaggggaaccggttcgaggtgctgcggccaccgcggcggcagaagcagcagcagcagcagcagcaggaggaggaggaggggtcggaggagaagccggaggactacgactactactactaccggggcgacctcgccgtcaccaccaccaccgccgcagaagacgacgacgacgacgacgccgtgcggcccgagcccatcggggcgacctggacgccggcgcggccgcccccgccggcgctggtgcggccggggctggtggtggcgctgcacttccacgggggcggcttcgcggtcggcaacgggcgcgacgcggacgcgggcttcgcggcgcagacgctgatccggcacatggggtgcacgcacgtgtgcgcgccgcagtaccggctggccagcagcggcagcggcaacgggcggttccccgcgccggtgcaggacgcgctgacggcgtacctgttcctggtgcgggagcgggggatccccgggcggcagatcgtggtgtcgggcgactcggcgggaggcacgatcgcgctcgggctggtgcgctacatcgccgagcacggggcggcgctgggcatcccgcgccccggcgccgtcgccctctggtcgccctgggtcgac

SEQ ID NO: 648 - protein, 295 aa, Myceliophthora thermophilia
MKETQTPTAQIQVRNNRANRLLSYCYTLVATPFLLSRFALDVVLYLVPWMRPAREWTLNQAVRVRVVRLVLLYWSLLRWGDRLHLRPGREGNRFEVLRPPRRQKQQQQQQQEEEEGSEEKPEDYDYYYYRGDLAVTTTTAAEDDDDDDAVRPEPIGATWTPARPPPPALVRPGLVVALHFHGGGFAVGNGRDADAGFAAQTLIRHMGCTHVCAPQYRLASSGSGNGRFPAPVQDALTAYLFLVRERGIPGRQIVVSGDSAGGTIALGLVRYIAEHGAALGIPRPGAVALWSPWVD

SEQ ID NO: 649 - DNA, 1950 bp, Myceliophthora thermophilia
  CDS (1)...(1950)
atggtcatctcgttgttcctgatcctggtagtcgccctcttggtaataccagggtacatccaagggcaaaagctgcctcgaggggcacgtcggttgccagggccgagaggcctgccgtacatcgggcgcgtacacgacgtgccctcgcaaacgtcatggctaaagttcttcgagtggagcaagcagtatggcccgatctaccagatgaagatgttcgggaccgtccatgtctggatatcctccgaatcggtcgcccgcgaccttctctccaaacggtccaagatctactcggaccggcctatgatccccaaccttcccgataaccgcaccagtggtacttatctcgccttgctgggaaggacagcggcgtggttccgccaaagaaagctctgcaacttcctgatgcacacgagcacctctgcctctctgcactcatacccgacgctggagcgtgaccggttcctgtacctcctctttctgtggcccgaccagtacatcgaatggatcgagcagctcaccagccgaacagtgtcgcgcctctgctggggcaccccgcagccgggccagatcctgcggcacacgactctgggcttgctcgagaccatcagcccgtccgggtcactgcccaacgtcctcaacttcctccgccacctgcccttcctcctgagcccgtggaagcgcaaagagaagggccggcgcgagctcgagatgaggctgttcgacgccaacctcgccttcgtgcaggacggcctcgaccgcggccaggccggccccagcttcgtccgcgccttcttcgagactaaggaggacccggacgagcgggttcggcagcggtggggggacgtgcccgaggccgtcaacgtggtcggcctcatggccatcgcgggcgcgctgaccatcggcagcccgctgcagtcgtacatgctcgccatgctgcactgcccggaatggcagagccgcctccaggacgagatcgacgccgtctgcggcggcgcctgcccgcagtgggacgacagagagcggctgcctctgctccgcgccgtcgtcaaggaggtcatccgctggcgcccgcccgtgcccacaggtatcccgcatgcgagtgaggcagacgatgtctacaacggatacttcatcccggccggagccacgatccacgctctcgagtggggcatcacccgtgacgaagctacgtacccggacgccgaaaccttcaacccggcccgctggctcgacccgtccttcccgaccttccgcgagcccctgacgcagtaccccaacctgagcggcttctcgcagttcgggttcggccggcgcacgtgccagggcgtccccatcgtcgagcaggatctgttcctgaccatgggcggtatggcgtgggggttcaacatcggcaagaagcgcgacccccagcacgcgggccgcgagctggccgtccactggaacgactatacgcccctcctcatcgccaagccctccatcttccccttcgaggcgacgccccggtccccggagaaggccgggcgcatgcgcgccatgtacggagcctcggttgccgccggccggctcccccgagacatggacctcggccagttccgggacgagctgggcgatcaagtctactgcgacgtcgacgacgatcttatgcgttgcgagcaggaggaggagagggaggaggaggaggccgggaaagccagggacgtgccggcggtcggtggaggcgagcaagatgaacacaacggggagatgaaagaggccgaagtgatgggtcgcgaggagaccggcgaggttgaggagagcggggagaatgacaaggccggggatgtggacctgtctgaaccacgattctcgcccaagtttcaacgccattccccgtcctgctccggcagagagcgtccgtcaccgatcaggtttgtggaggtcgctccggatgttggtggagagaactggtga

SEQ ID NO: 650 - protein, 649 aa, Myceliophthora thermophilia
MVISLFLILVVALLVIPGYIQGQKLPRGARRLPGPRGLPYIGRVHDVPSQTSWLKFFEWSKQYGPIYQMKMFGTVHVWISSESVARDLLSKRSKIYSDRPMIPNLPDNRTSGTYLALLGRTAAWFRQRKLCNFLMHTSTSASLHSYPTLERDRFLYLLFLWPDQYIEWIEQLTSRTVSRLCWGTPQPGQILRHTTLGLLETISPSGSLPNVLNFLRHLPFLLSPWKRKEKGRRELEMRLFDANLAFVQDGLDRGQAGPSFVRAFFETKEDPDERVRQRWGDVPEAVNVVGLMAIAGALTIGSPLQSYMLAMLHCPEWQSRLQDEIDAVCGGACPQWDDRERLPLLRAVVKEVIRWRPPVPTGIPHASEADDVYNGYFIPAGATIHALEWGITRDEATYPDAETFNPARWLDPSFPTFREPLTQYPNLSGFSQFGFGRRTCQGVPIVEQDLFLTMGGMAWGFNIGKKRDPQHAGRELAVHWNDYTPLLIAKPSIFPFEATPRSPEKAGRMRAMYGASVAAGRLPRDMDLGQFRDELGDQVYCDVDDDLMRCEQEEEREEEEAGKARDVPAVGGGEQDEHNGEMKEAEVMGREETGEVEESGENDKAGDVDLSEPRFSPKFQRHSPSCSGRERPSPIRFVEVAPDVGGENW

SEQ ID NO: 651 - DNA, 1776 bp, Myceliophthora thermophilia
  CDS (1)...(1776)
atggttcagaacggaggtgacctcgacctcgacatcgacatggctactaacgaactcgagaacggcgaaaagtattcgcagaaactggttaacgaggcttacgccaaaatcgaagcgctcgagactgccaaagcgagccgcatcaagatcgaaccacctggcaaatatagaggaactaaggaggatctcgcaggattcctgacaaaccttcgatcctactttcggcttaataacgacaagtttccggacgacaaagccaaagttctctacgcagctacgagattggagggcaaggcactcagatggttcgaacctacgtggaatgactatctcactgaggaagacgaggacgaccgagacgcgttcacgcaggcagtcttccgatcttacgaccgtttcgaagaagagcttcggaaggtttttagcgacaaagacgagaagattcatacgcaagaaagactcgccaacctccgacagaccaagtcagcagcctcttacaccgaaaaggtcaaagacgagctatataagtacgaccggcctgagaccctggacgaatacatcgcacaggccattaggatcgatgatcgactctacacacgagagcagcagaaacgaggtcggatgaacggaaccacggttaaggccaacgacaagaaaaagcgagcaaaggaaattgcggccatcgacgaaactaccaaggacgtcatcaaagtagcggccacgagctacgaagacaggggcagcgacatagacagtctcggacatgacgacaatggagaagacgaacaagcaccgtactccgaactggtcactgtagacccagagacaggtctcgccgaatgggacgtggcaggagaatatcaaagcgatgagatgagggacgagatggggaaactccgacgtatcgtggaaaccatcaaaggggaacagcctgtaatatacgatgggcctgatagctacgtcgagtattttgacgaccagcaactcagccacgatatacggaacccggaataccagttcatgcgcgcgaaccgcggaaaagacaaacatgtatacgtcccccctgaaggggtgaggccgggggacagggtgcccgtgttgcacaacttccacggcagcgcatatgcgtttagcagcaaggacattttcttcagccccatgggcctgttcgacttaatgcacaggcagaataaaaccaaattcgtcgccgttgccaacaactacaggtcagtgctccttctcctcctccttcacctcctcctgctgctcctcttcctctgtggcacgaatgggaataccggggttacctgggccgacggggaggatctcgacggcaacgtcgggatgctggactgtctcgcggcagccgagtggacggcggcgcacatccacaagtgtggaggcgataggaagcgcgtcacgatcctggggcagagcgccggtgccggcattatctactacctgactgtgctcgacggcggtagggtgaagcccttgcccttccagcatgccttgccttcaaatcgtcgccggcggcggcgcagcggcgcgacgtcaagagccacgtcggtcagcaacccggagctggcttttgccttcgaagcgaagctgctggcattggtgctgggcgaggacatggcgtggccgacgtacggtaaggacaagcgtatgtacaacatcacgaacacgttcgaggcgacgaccatgccgcccaaactgcgccaccggtgcgaactcctcagccggtttgtgctcgacccagccaacggcgcatga

SEQ ID NO: 652 - protein, 591 aa, Myceliophthora thermophilia
MVQNGGDLDLDIDMATNELENGEKYSQKLVNEAYAKIEALETAKASRIKIEPPGKYRGTKEDLAGFLTNLRSYFRLNNDKFPDDKAKVLYAATRLEGKALRWFEPTWNDYLTEEDEDDRDAFTQAVFRSYDRFEEELRKVFSDKDEKIHTQERLANLRQTKSAASYTEKVKDELYKYDRPETLDEYIAQAIRIDDRLYTREQQKRGRMNGTTVKANDKKKRAKEIAAIDETTKDVIKVAATSYEDRGSDIDSLGHDDNGEDEQAPYSELVTVDPETGLAEWDVAGEYQSDEMRDEMGKLRRIVETIKGEQPVIYDGPDSYVEYFDDQQLSHDIRNPEYQFMRANRGKDKHVYVPPEGVRPGDRVPVLHNFHGSAYAFSSKDIFFSPMGLFDLMHRQNKTKFVAVANNYRSVLLLLLLHLLLLLLFLCGTNGNTGVTWADGEDLDGNVGMLDCLAAAEWTAAHIHKCGGDRKRVTILGQSAGAGIIYYLTVLDGGRVKPLPFQHALPSNRRRRRRSGATSRATSVSNPELAFAFEAKLLALVLGEDMAWPTYGKDKRMYNITNTFEATTMPPKLRHRCELLSRFVLDPANGA

SEQ ID NO: 653 - DNA, 1695 bp, Myceliophthora thermophilia
  CDS (1)...(1695)
atggcttccgaatatgatttcgtggtggttggaagcggacctgcgggctgtgcgctcgcgtacggtttggttcactcggctaaaaagcccaaggttctcctgctcgaggccggtggcaaaaatggagatcccaacctccgcgtcgacgggcagcgttggttgaccttcaccaacaaagacgtcaactggggctacaagacgacaccccagactcactgcgccgggcgcgagctcgactactctaggggtctcggtctcggcggatctagcgccatcaactttggcgtcttcaccgtcggcgcccgcgacgactacgatgagtgggcacgcatcgtcggcgacgacgccttccgctgggagcacgcccaggcacggctgaagcgcctggagaacttccagtccaaccccccggcgggcgtcagcagcaagtacgcggcacccaagccctcggaccatggctcggccggccctctccgcgtcggctacgcggccgagtgtgaggccgacctcgtcccgctgctcgacgccttcgagcgggccggctatcccctgaatcccgaccacaactccggcaacccgatcggtatgtccttgctgatcagctcggcgcacaagggcctccgctccacgtcgcacgacttgctggtaccatacccggagaacctcaccgtcgtgaccgaggcgcccgtgcagcgcgtcttgctggacggcaagagggccgtcggcgtggaggcgaacgggaagcggtacctggcttccaaggaggtcatcatgaccgccggctcgctcgacaccccgcggatcctcatgcactccggcatcgggccgaaggagcagctcgagaagtacaacatccccgtcgtccatccttgcgccgctatcggccagggtctgcgagaccacgccttcgtcccgctcgtctatacccgcagggagggtagcacggaccgcgccagcttctacggcaaccaggcggccatggatgccgccctggaggagtggaagcagcaccgcacggggccttggaccaagttcgccaccgagatggccatcggctacttcaagtcggacgcgatcgcgtcctcggccgagttcaagtcgctccccgcggacgagcagcggtacctcaacgccgagacggtgccgcactacgaggtcttcacccacttccccatccactggtacatgccgggcttccggaacgaggacctcaactactcgtgcctcctcgtcttcctgtacaacgcccaggcgcgcgggaccgtgacgctgcagtcgtccgaccccgacgtgcccctgctcttcgaccccaacttcctcgcgcaccccttcgaccgccgcagcgccatcgaggccctccgcgaggtcctgcgcttcaccaggacggaggcctacgccaaggacatcgtctccaccatcgccgcgcccaagtccgactcggacgaggacctgctcgcctactgggagcagaccatcggatcgagctggcacatgaccggcaccgtcaagatgggcaagccgggcgacgccgacgccgtcgtggataacagcttccggcttatgggcatcgacggcctgcgcgttgccgatatgagcgtcgtccctgtgctggcgagctgccacgtgcaagctgttgcgtatatcaccggcgccacatgcgctgagaagctggtgaaggagtatggtctcgagtaa

SEQ ID NO: 654 - protein, 564 aa, Myceliophthora thermophilia
MASEYDFVVVGSGPAGCALAYGLVHSAKKPKVLLLEAGGKNGDPNLRVDGQRWLTFTNKDVNWGYKTTPQTHCAGRELDYSRGLGLGGSSAINFGVFTVGARDDYDEWARIVGDDAFRWEHAQARLKRLENFQSNPPAGVSSKYAAPKPSDHGSAGPLRVGYAAECEADLVPLLDAFERAGYPLNPDHNSGNPIGMSLLISSAHKGLRSTSHDLLVPYPENLTVVTEAPVQRVLLDGKRAVGVEANGKRYLASKEVIMTAGSLDTPRILMHSGIGPKEQLEKYNIPVVHPCAAIGQGLRDHAFVPLVYTRREGSTDRASFYGNQAAMDAALEEWKQHRTGPWTKFATEMAIGYFKSDAIASSAEFKSLPADEQRYLNAETVPHYEVFTHFPIHWYMPGFRNEDLNYSCLLVFLYNAQARGTVTLQSSDPDVPLLFDPNFLAHPFDRRSAIEALREVLRFTRTEAYAKDIVSTIAAPKSDSDEDLLAYWEQTIGSSWHMTGTVKMGKPGDADAVVDNSFRLMGIDGLRVADMSVVPVLASCHVQAVAYITGATCAEKLVKEYGLE

SEQ ID NO: 655 - DNA, 1314 bp, Myceliophthora thermophilia
  CDS (1)...(1314)
atgaccacttacaccagggcgcgccccacgatgatgcgggtcttcctcgttcaaaccgcgcagggtctgactccctcgtcgggtggttacaaggcaaacgtcagccttctccgcagcctgagcatgcagggccacgcgactgcccagatctgctatgctgttgaggacgaaattgaccagtacgctagacgtgccgagctcaaagggattagccccaacattacccacaagccgctgcccgtcgtcgacccggccggcaaggtccatgagctgtatgtcaagacgttcaccgatgagtacaaggttcacaacgtggtcatttcgcgcaccgagttcaacgcagcctatccgcgtgacgagctcacaagccgcatggccacccttatcaaccttttttcggagcacatcgccagtttccagccgacccatgtcatcttcaacgacccgattaccatgaagattaccgagtcgcatgagattcgcgacacgttcaagcgcatcaacatcatccacacggcagagcagctgccctttggtccgtttgtcgccggtgtcgacggccattgcttgtcgccggtggtcgagaacaagatgttgcgagagctggatgggatctggtccgtttctaaggcggtccaagattacgcctggaagtacggccgcctgaagaccacattcctcgttcatccctgcatgacctacttggatcagacgtctgggggcatgcctcgcattcgcaacaacatcgacaaagaagaaattggcatggtcaatccctgcccgcacaaaggcctgtcgattctgatcgcgctcgctcagaagtttccccacatgaagtttgtcacctggaagagctggggctccagaaccgctcatgtccagcagctgcaggctcttcccaatgtgaaaatcgagccgactacccggaacaccgacgagatctgggaccgtgtcaaggttctccttgccccatccctgtggtacgaggcctggggaattgttgtcactgaggctcagttgcggggcatccccgtcattgcgtccaacgctggtggccttcccgaagcgaagatcggccttccctactgcatccctgtcaaggaagtcactggtgagcgccatgccaacggcgactacgtggtgcctgatcaggacattggcccgtgggaagatgctcttcaaaaggtcatgaccgatagggaggagtaccaggccctgcagatactcactgccaccaaggccggcgagtggctccgcagtctggaccctcgtgctcacgagaagtggctcctctctatgatggaacaggcgtaa

SEQ ID NO: 656 - protein, 437 aa, Myceliophthora thermophilia
MTTYTRARPTMMRVFLVQTAQGLTPSSGGYKANVSLLRSLSMQGHATAQICYAVEDEIDQYARRAELKGISPNITHKPLPVVDPAGKVHELYVKTFTDEYKVHNVVISRTEFNAAYPRDELTSRMATLINLFSEHIASFQPTHVIFNDPITMKITESHEIRDTFKRINIIHTAEQLPFGPFVAGVDGHCLSPVVENKMLRELDGIWSVSKAVQDYAWKYGRLKTTFLVHPCMTYLDQTSGGMPRIRNNIDKEEIGMVNPCPHKGLSILIALAQKFPHMKFVTWKSWGSRTAHVQQLQALPNVKIEPTTRNTDEIWDRVKVLLAPSLWYEAWGIVVTEAQLRGIPVIASNAGGLPEAKIGLPYCIPVKEVTGERHANGDYVVPDQDIGPWEDALQKVMTDREEYQALQILTATKAGEWLRSLDPRAHEKWLLSMMEQA

SEQ ID NO: 657 - DNA, 1452 bp, Myceliophthora thermophilia
  CDS (1)...(1452)
atgacggctcaagcaccagatcccgggcctcgagccgccaacgggccagcgggcagcaaccacaagatgatgcttgccctcctgcccagatcaaaatacctagacctgcggaccgaggtcgcgatcgccatcttgcgatcgttcactaacccgtcgtcgccccggagcatcacggcgacacagcgaatggctgcccaggctccggagctgaagggcaggatctgggttagcacgtacgcctgcccgcccccgcccgccgaggagagagggctacaggacgccattgcaaaggctatcgacgaactgcgggatcccagggtaccaacgccaacatatgaaatgcccgagcccgcgcatgtcgaggcggagtggacggggtatcgcgccgacgcgacgccgaactcgaggttgccggacctgcccgagagggatctctacgccgaaatgatgaaggaggtcaagagccccgcgacggtgctctacttccacggcggcgcctactacctgctagacccggcaaaccaccgtccgaccaccaagaagctggccaagctgaccggcggacgcgtctactcagtccggtaccgtctcgcgcctcagaacccgttccccgccgcactgatggacgccttgatgtcgtaccttgccctcctctaccctcccgagggcgccttccacgaggctgtcaagccggagcacattgtctttgccggcgacagtgcgggcggcaacctctctctcgccctcctccaactgatcctccacctccaccgcaactcccacaccgtcctctggcacggcgccgctcgggccgtcccgctccccggcggcgtcgccgtcaactccccctggctggacatcacgcactcgtcgccgtcgtgcacggccaacgcggcgttcgactacctgccgacgctggaccagcagctcgcggccgaggcgaggcggccgccctgcccggcgtggccggcctcgccgccgcgcaggcacctgtacgcgcccgactcgctgctcggccacccgctcgtgagcccggtgacggcccggtcgtgggccggcgcgccgcccgtctacgtctgcgccggctgggagctgctggcggacgaggacaagttcgccgcccacaagatgtggcgcgagggcgtcgcggtcgtctgggaggagtacgaggccatgccgcactgcttcgccatcgtcttcccttacctgcgcgaggcgaggcgctgtctggaagggtgggcggccttcatcaaggccgtcgccgagggcgggccaacggcggcggcggcgacgcccgagagccggttcctgacgatccgggcgatgtcgctcgaggaggtggccgtcgagccggacagtctgtggacggacggggaggaggtggtggctgagagggtctggagaaaggtcagggagaggctggtgccggaggagagcgttgccaagttgtga

SEQ ID NO: 658 - protein, 483 aa, Myceliophthora thermophilia
MTAQAPDPGPRAANGPAGSNHKMMLALLPRSKYLDLRTEVAIAILRSFTNPSSPRSITATQRMAAQAPELKGRIWVSTYACPPPPAEERGLQDAIAKAIDELRDPRVPTPTYEMPEPAHVEAEWTGYRADATPNSRLPDLPERDLYAEMMKEVKSPATVLYFHGGAYYLLDPANHRPTTKKLAKLTGGRVYSVRYRLAPQNPFPAALMDALMSYLALLYPPEGAFHEAVKPEHIVFAGDSAGGNLSLALLQLILHLHRNSHTVLWHGAARAVPLPGGVAVNSPWLDITHSSPSCTANAAFDYLPTLDQQLAAEARRPPCPAWPASPPRRHLYAPDSLLGHPLVSPVTARSWAGAPPVYVCAGWELLADEDKFAAHKMWREGVAVVWEEYEAMPHCFAIVFPYLREARRCLEGWAAFIKAVAEGGPTAAAATPESRFLTIRAMSLEEVAVEPDSLWTDGEEVVAERVWRKVRERLVPEESVAKL

SEQ ID NO: 659 - DNA, 1875 bp, Myceliophthora thermophilia
  CDS (1)...(1875)
atgcatatcctgtcgactctgagcctcgcagctctgtcggcgcctctggcgtctgcctcatttgatgggaacatcaactacctcagcccttcccggcgccatgtcaaccttggcatcgacgtcccggcagtcgcccgccgcagcatgaagcgcggcgccgtgccgtataagccatccgagttgaacttcactcacggtatcgcgtctggcgacccctatccggacagcgtcattctctggacccgcgtcgcgccgtccctggcttcagataacagcaatgtgaccgtcgagggaatcgttgacctgtacaatcacgagaccgaaaagtacgtcaaggcggatcctaacccaatttgcgtcgaatggaaggtctgggaagcccaggagaaaggctcgaaacgtcctggtcacggcggatccgggaagcacattgtttcgcagggtactgcctacaccactagcgatattgactacactgtcaaggacgaggccaagggccctgaagccattcaccaccctacaactaccaattcaacgtttgcaagtcacgataacgccagcccggtgggaaggacaaaaacggctccaagggagaatgctaagctggacgagatcaaccttgcggtgttctcgtgcagcaatttccccaatggctatttcaatgcctacggcaacgcggcgcggaaggacaagcacgactacgtggtccacctaggtgactacatatacgaaggagctcaggggggcgagcgtgcacacaacccgccacgcatcatctttagcctgtgggactataggacccgtcacggacagtaccgcactgatcccgatttgcagctcctgtctcagaactatgcttggatgccgacgtgggatgatcatgaaattgccaacaacggttacagggacggattcagcgcgctgaacaacaccgaagactccttccgcaaggacggcccgtccatcagcgtcgatcagcgtaagatgaacgccgtgcgggcctacttcgagtggatgcctatccgccaagtcgacctcgacgacaatcttcggatctggcggtccttcaaactgggccggctgctggacctgatcatccttgatacgcgcaactacgaccggagcatcactagcctgggctggaacgaccactacatcgacctgatccgtgacgacgcctcgcggtcgctgatgggctcgcgccaggagcactggttctacaaccagctggccgagtcgtcgcggcggggggccgcctggcgcgtcgtcggcagccaggtcatcttctcggacatcaacaacagcggcgacacgtggtcggggtacacggccaaccgcaaccgcacgctcaagcacctgtacgataacaagatcggcaacaacgtcttcctcgccggcgacagccaccagaactgggtctcggacctggcctggctcggcgagaagccgtacgactcccagaccggcgagggcgccgtgggcgtcgagttcgccggcaccgccgtcagctcgtccggccagagcggccccatcctggccgcgcgcgagaaggcccgccagcaggtcgaggccaacgagctgatgcagtggcaggaggggtactaccgcggttacttcatcctcaggatccgcgaggaagcggtaacggcgcagtattttggctcgcccagcgtggccacccccaatgcgtgggatctcccgctggccaacttcacgatcgcttcgggaaagaatcacctgacgcgtccagtggccggcggcaacgtcgaggccgggttcgtccgcggcggcacgacgacgggcacgaacctgacgctcaacacggagaccgggaagtgggacgttgttgggttcgagaagatgtacatcaaataa

SEQ ID NO: 660 - protein, 624 aa, Myceliophthora thermophilia
MHILSTLSLAALSAPLASASFDGNINYLSPSRRHVNLGIDVPAVARRSMKRGAVPYKPSELNFTHGIASGDPYPDSVILWTRVAPSLASDNSNVTVEGIVDLYNHETEKYVKADPNPICVEWKVWEAQEKGSKRPGHGGSGKHIVSQGTAYTTSDIDYTVKDEAKGPEAIHHPTTTNSTFASHDNASPVGRTKTAPRENAKLDEINLAVFSCSNFPNGYFNAYGNAARKDKHDYVVHLGDYIYEGAQGGERAHNPPRIIFSLWDYRTRHGQYRTDPDLQLLSQNYAWMPTWDDHEIANNGYRDGFSALNNTEDSFRKDGPSISVDQRKMNAVRAYFEWMPIRQVDLDDNLRIWRSFKLGRLLDLIILDTRNYDRSITSLGWNDHYIDLIRDDASRSLMGSRQEHWFYNQLAESSRRGAAWRVVGSQVIFSDINNSGDTWSGYTANRNRTLKHLYDNKIGNNVFLAGDSHQNWVSDLAWLGEKPYDSQTGEGAVGVEFAGTAVSSSGQSGPILAAREKARQQVEANELMQWQEGYYRGYFILRIREEAVTAQYFGSPSVATPNAWDLPLANFTIASGKNHLTRPVAGGNVEAGFVRGGTTTGTNLTLNTETGKWDVVGFEKMYIK

SEQ ID NO: 661 - DNA, 3732 bp, Myceliophthora thermophilia
  CDS (1)...(3732)
atggatccaaacaacagccaaaacaaccccacccatagggctgaagtcgcaccaggagacaccgctggtgttcccgctggtgctgttgctgctgctgccgccgcggccgcggccgttgccgttggccacgttcaagccaaggacttctcggcaacagcttccggtgacagtgccaccataaaggaacacacaaaccaggctcgccaaagcccaggaaaccagcctgctccggccagttcggccgacgacgacacaggaccccgctttgtggcagtcgacggcgatgtgggcggccccggtcccaatgaaacctttgtcgatgttatcgcagtgccttgtccgggtgctgacccgatcgatacctggaccgttggcgtcgagccttggtctaacaccagcaaccccagcgatgctggatcacgcagttcgttgtacagacctggcccgtgggtcacaaggaacttgcgcaaggcagctagcattgcgagagtctttctctacaggcatcgctcactagagaatggcatgactctgaggtcgttggcaagagatctgttggacaaggtggaacagatccgtaatgtgtctatcgcgcggcctctattcttcgtcggccatagtattggtggcttagtcgtcaaggaggcattagtcttggccaaagggtctccccaataccggacgatagtggacaactgctacggtgttagtttcttcggcacgccgcacaggggttcgagttacatgtccatgaagaaccttaaggagagtatccgagagcttcttcgcctacaagcaccccttcctcggtcgttgacggatgaaattaacgtccgaaatacggccttaactgatctccatgaccagtttgtggacatggcgagcgagtttcgcctctggtcattttacgaaactcgggagtcgttgctttcaggctcagctggattctccaatgaggtgcagttcggagtcccgttggtatcggtcaagtctgcacttctcgacgtctggcaggaagacgtctttgcagtcgacagcgatcatgcccacctcgcttcgtttgggccgaccaacgtgcgcatcatggactcgtacctcgctgatttcgcccaggccattgagagagcagcgaaacttagcctcgcccatcctcacacgccgcttcatttgaggtcgctcgtcaaggttgaggtcattggtttttacgaggacccagacgcggtgttggcatcccctcggcagcagcaaggcggagagaatggctccgtcatccgcctctattccacgaaatacccttacaaggagttcctcaaaaaggggccagatcgttgcctcgccgaacggctcctcaaaggacataagaggcggcctagccagcgaagcattggcgatgacgccgaggaagagcgctcgactcgacagcccagggaagagcatgccgtgcccagcctcccgcgtcatcagactgatgcgacgcaaagcagcgactcgccagagattgtcatcacgagtccgctagaaagaccaccgctgctgagggtaccggcccagtcagaaccgagcgttcgcccctcgagccccgagagcgaggcgagtgtcagcaccaccgtgtcagatccagttctgccgtttagccacaattttaccgaagaggacgcccacactattgacttgctagctaaacagcaggcgaagctgctgatgaaggagcatggactctccgccaccgctggtttctccaggcctagtccatcgctgagaaagttcatgtgggtccatacgccgttcaacaatcccgtctgggtcaaggaaatctttgctactctgtcaaggactcaagggttggatttctcgcggctctttgattacgataattgggtgtcgaagcaggtccagaaccgaaattccgactcgcagcctgcgtatctcaaagcaacctgcaagtacctctcggctgcagaccgtccgggctcgcctcggatcccttcgcctcggttcagccctcccaatatgggaatcacgcccaactgcttctacctctacctcccttatcttcactttgatacgtatcacagcatggtccgtcgtcgaaaactgatcgcgaagcgccggagccatgggagagcaaagcctgtgcccaaatgggtcgaggaggagaacctcgagctcaagatgatctgggagtatattgggttcgacccacccttgaattgccgacggaccttggaccagttcggacacggctccctgagagacacccattcgcgggacgatgaccagatgctgtacaagctcaccaagaaggacactcattccccatggaagcagatgggagattgtagctcaacacgatcgctcgctgggcaccccctggattctccgagggagtcctcgtcaagcctctatagtgacgcagatgctgagattggggcggatcccgggtccgagctcaaggatggtcctgtccttatggtcgaccagttatggctctggtctatcgacatgaacaccttggtaacgtttttctccaagcgagaatcaagcccaaccgaggggacgcttttccagcaagcggatctgcgaagcagcgtctacaacgagctgaatggcgatctaacgggaagaactgaaaacactctggacctcgcggcgttgatcgtgtggcacgccgtgactgttcttctcgaccgatccacgcaccctgatctcgaggtattccgcatctttgacgaggccatcggtatgctggcggagaggatgaccctgaacatgaaacaattccggattaacgctcttcacttggatgccggggatgatgatgacgagtcggacgattcggacatggaggcggagagcccgtcagcaattaagaagcggcacaggcgcgagcttgaacgagcggaacgtgaaaatagggaaaacacatcagcactgctagaactacgcgacctagaagacgagttgacgacactccagaagctctttgagatgcaggactcgaccgttcgccagatgaaggaaatatatacgagcaaggagttcaacgaggttaccaaggctgggcaggaacacctcgatgaggcgctcgactatctggacgatttcaggcagcagaccgcggagatgctcaggagagtggaagtcacgaggaacgattacgagaaaatgcttgagatggcacagcgtcaagcgcaggtcgacgaggtccgctggtcgcgtctgcaagccgaacttgcatcgagccaaaacctttcagtcatgatcttcaccacgttcaccgtcatctttttgcccctgaccttctttaccgggttgtttggcatgaatacgaccgagtggcaggacgagaatattcccagcctgaaggagattggtgctatctcgctcccagcatcgtttctgctgatcgtgttgtcgctggtggcggccttcagctggcgcgtgcagagcgcctttaaaacgacgtacaagggaatcaagacgtcgtggaaggtgctcaagggtctatactccgagcgactggagccgacgtggaggaaggaggccaagagaagaaagagggaagaaaaaaggaggcggcacaaggagcagatgatggcgccggacgaccagagctacgacttctgggccatggtcaagaggcagcagagagcggtgaggacgcagatcccgatacaaaacgtcaacgggtcgccgacgggggatgactggatgaagcggaagatgttatga

SEQ ID NO: 662 - protein, 1243 aa, Myceliophthora thermophilia
MDPNNSQNNPTHRAEVAPGDTAGVPAGAVAAAAAAAAAVAVGHVQAKDFSATASGDSATIKEHTNQARQSPGNQPAPASSADDDTGPRFVAVDGDVGGPGPNETFVDVIAVPCPGADPIDTWTVGVEPWSNTSNPSDAGSRSSLYRPGPWVTRNLRKAASIARVFLYRHRSLENGMTLRSLARDLLDKVEQIRNVSIARPLFFVGHSIGGLVVKEALVLAKGSPQYRTIVDNCYGVSFFGTPHRGSSYMSMKNLKESIRELLRLQAPLPRSLTDEINVRNTALTDLHDQFVDMASEFRLWSFYETRESLLSGSAGFSNEVQFGVPLVSVKSALLDVWQEDVFAVDSDHAHLASFGPTNVRIMDSYLADFAQAIERAAKLSLAHPHTPLHLRSLVKVEVIGFYEDPDAVLASPRQQQGGENGSVIRLYSTKYPYKEFLKKGPDRCLAERLLKGHKRRPSQRSIGDDAEEERSTRQPREEHAVPSLPRHQTDATQSSDSPEIVITSPLERPPLLRVPAQSEPSVRPSSPESEASVSTTVSDPVLPFSHNFTEEDAHTIDLLAKQQAKLLMKEHGLSATAGFSRPSPSLRKFMWVHTPFNNPVWVKEIFATLSRTQGLDFSRLFDYDNWVSKQVQNRNSDSQPAYLKATCKYLSAADRPGSPRIPSPRFSPPNMGITPNCFYLYLPYLHFDTYHSMVRRRKLIAKRRSHGRAKPVPKWVEEENLELKMIWEYIGFDPPLNCRRTLDQFGHGSLRDTHSRDDDQMLYKLTKKDTHSPWKQMGDCSSTRSLAGHPLDSPRESSSSLYSDADAEIGADPGSELKDGPVLMVDQLWLWSIDMNTLVTFFSKRESSPTEGTLFQQADLRSSVYNELNGDLTGRTENTLDLAALIVWHAVTVLLDRSTHPDLEVFRIFDEAIGMLAERMTLNMKQFRINALHLDAGDDDDESDDSDMEAESPSAIKKRHRRELERAERENRENTSALLELRDLEDELTTLQKLFEMQDSTVRQMKEIYTSKEFNEVTKAGQEHLDEALDYLDDFRQQTAEMLRRVEVTRNDYEKMLEMAQRQAQVDEVRWSRLQAELASSQNLSVMIFTTFTVIFLPLTFFTGLFGMNTTEWQDENIPSLKEIGAISLPASFLLIVLSLVAAFSWRVQSAFKTTYKGIKTSWKVLKGLYSERLEPTWRKEAKRRKREEKRRRHKEQMMAPDDQSYDFWAMVKRQQRAVRTQIPIQNVNGSPTGDDWMKRKML

SEQ ID NO: 663 - DNA, 1089 bp, Myceliophthora thermophilia
  CDS (1)...(1089)
atgaagatcagatatgtattcctcctcttcctcggcctcgcttcgcctggggtctctcggactctcctgggtatgaacaaatctctcgccggagaaatctcacccgccgccgcgaagcgtcagacaggggaactcctagcggacctcagcaccctccctgacgccgctctgtcaccggcgggctggacgatcaagaacattctgctcggcaaccgcgcggccgtatcaccgcaggacctgaccaccgtctacacggccccgggaccgctcgacagctccgaatgccgccgcgagacctgctgcgtgtggaagtacatcgcagacgccatggctacgtccttccgcgacggcgccggcaggtgtaacgagctcgcgcgccaggcggtccgcctgggcttccatgacgccggcacgtggtcgaagtccgcgggcggcggcggcgccgatgggtccgtcctcttggctcccagtgagctggcgcgggacgacaaccgcgccctcgaggtcgtcgcggcacaaatggcggcctggtacgcggagtggcggccccgcggcgcccgcatggccgacctgatccagatgggcgcggtggtagcagccgcgtcatgcccgctgggcccccgggcacgcgccttcgtcgggcgcaacgacagtgccacacccgcccctccggaccggctcccctcggccgccaacagcgacgccgccgcgctggcggcgctgtttgctgacaagacgctcagcctcggcgagcttgtcgccctcgtcggtgcccacaccaccagcgttcagcggttcttcgacccgctcgccgccgggtccccgcaggactctacgccgggcgtctgggacaccctctactacaaccagacggccagctcggatcctccgcagggcgtgtttcgtttcccgagcgacctggcgctgtcgcaatacccccccgcgcgtgagctgtggcaaacatttgcgaatgcgcaggctgtgtggaatgatgactttgccgctgcgtacgtacaccttagcgtgctcggtgttgagcacatcaatgacctgacagagtgcaccggtgtgctgccattgtcgggttga

SEQ ID NO: 664 - protein, 362 aa, Myceliophthora thermophilia
MKIRYVFLLFLGLASPGVSRTLLGMNKSLAGEISPAAAKRQTGELLADLSTLPDAALSPAGWTIKNILLGNRAAVSPQDLTTVYTAPGPLDSSECRRETCCVWKYIADAMATSFRDGAGRCNELARQAVRLGFHDAGTWSKSAGGGGADGSVLLAPSELARDDNRALEVVAAQMAAWYAEWRPRGARMADLIQMGAVVAAASCPLGPRARAFVGRNDSATPAPPDRLPSAANSDAAALAALFADKTLSLGELVALVGAHTTSVQRFFDPLAAGSPQDSTPGVWDTLYYNQTASSDPPQGVFRFPSDLALSQYPPARELWQTFANAQAVWNDDFAAAYVHLSVLGVEHINDLTECTGVLPLSG

SEQ ID NO: 665 - DNA, 507 bp, Myceliophthora thermophilia
  CDS (1)...(507)
atggcagcaaacgcaggcactaagctgagtcctttgagattcgtccgaacggtcatgaactcgttcatggccgattccggacttgagcctcggcttcttgggaaacacttccgcgtcaccaatgccacggaaggtgtcgtggacttcgagctcaacattgccaaagagcacacgaaccggctgaagatcatccacggcggcaccatcgccagcttggtcgacctcgggggctcgctcgccgtggcctccaaggggtactacgccaccggtgtctcgaccgacctcaacgtcacatacatcagcggcggcggcaaggtggatgacaagctcaggggaacggccgttttcggaaaaacgctggcgtataccacggtaacattctgggataagaatcggaacatagttgccagaggaagccacacaaaattcgtcgcccaagctgttgccgccagcacacccttcgttcctcctgagggtgccccaattgccgatgatgctgagcattaa

SEQ ID NO: 666 - protein, 168 aa, Myceliophthora thermophilia
MAANAGTKLSPLRFVRTVMNSFMADSGLEPRLLGKHFRVTNATEGVVDFELNIAKEHTNRLKIIHGGTIASLVDLGGSLAVASKGYYATGVSTDLNVTYISGGGKVDDKLRGTAVFGKTLAYTTVTFWDKNRNIVARGSHTKFVAQAVAASTPFVPPEGAPIADDAEH

SEQ ID NO: 667 - DNA, 726 bp, Myceliophthora thermophilia
  CDS (1)...(726)
atgcctggctcatccctctggcttctgcctcccgagaatcaccccctcaatccggtcctgcggaccctcatcaccagcaccctcccgtccgccttcccccgcgaggccgcctcctcgccccgcgtcgtcccgcacttcttccccgcccacgtcacgctcacgagcggcatctccccggacgcctacggcgacgatccccagggctggctcgaccgcatcccctttccgaagaagggaagagggggagatgatgaagaagaagaaggaaacagtggaggtagtagtagccgggccaaggtccggttcgagagggtcgtcagccaggacgtgttctaccgccgctgtttcatcagggtcgcgtttgatggggtgaaggagatcgccggggtcgccagagcggccgcagtactaggggaaggggtggaggtggacgcagagggaaacgtcaaattcggcggggagacggagaagtggctgagctggtggagggaagagtttgggccgcacctcagtctgatctacggtaacgagccgatcctagatggcgcgctgcgagaaatcaccagggtggtgcagcaggcaggaatcaagttgtctgacgaaactgagaacggtgcgaaagagggcgacgctctggacggttgggacggcggcgtgatctggctggtcccgactgacaaacccatttcggagtgggggaagcccatagcgacaaggaagatttga

SEQ ID NO: 668 - protein, 241 aa, Myceliophthora thermophilia
MPGSSLWLLPPENHPLNPVLRTLITSTLPSAFPREAASSPRVVPHFFPAHVTLTSGISPDAYGDDPQGWLDRIPFPKKGRGGDDEEEEGNSGGSSSRAKVRFERVVSQDVFYRRCFIRVAFDGVKEIAGVARAAAVLGEGVEVDAEGNVKFGGETEKWLSWWREEFGPHLSLIYGNEPILDGALREITRVVQQAGIKLSDETENGAKEGDALDGWDGGVIWLVPTDKPISEWGKPIATRKI

SEQ ID NO: 669 - DNA, 906 bp, Myceliophthora thermophilia
  CDS (1)...(906)
atggggattcatggctcaagcctgtcgcggccgtccgcgcttagcggcttgggcagagagatagctcatgactacgccctgttgagagacagttacgaggccccccagcaccccatcgtccttgtccatggcctccttggttttgccgagctgaagctggccggttcctacctgcccagcattcaatactggcgtggcatcaaagaagcgcttagtgccaacaatgcagaagtcatcaccgcctcggtgccccctaccggttccatcgagcagcgggcggccaagctggccaaggacatcgaagcccaagcccgtggcaagagtgtcaacattgtggctcacagtatgggcggcctggacgcccggtacatgatctcgcatctccggcccgccagtgtcaacgtcaagtccctcatcaccgtggccactccgcatcacggcagtccctttgccgactatctcatcgagagcatcgggccgggctacttgcctcgcctgtatgacctgtggcagcggacgacgggctgggaaccgagcgccttttcccagctgacgacgaggtacatggttgaggagttcaatcctaagacccccgacaacacaacgatacgctacttctcctacggcgccatggtcaagcacaagccgcccctgctgagcccgtttcgccactctcaccaagtgatcgaggagcgcgaaggaccgaatgacggccttgtcagtgtcgagagcagcaaatggggcacctacaagggcaccctgctgggtgtcaaccaccttgacttgattaattggagcaaccggctccggtttacggtgcaaaaatggatgggtcatccgccatccttcaatgcagtagccttctatctcgacataggcgacatgcttgccaaggaagggctctaa

SEQ ID NO: 670 - protein, 301 aa, Myceliophthora thermophilia
MGIHGSSLSRPSALSGLGREIAHDYALLRDSYEAPQHPIVLVHGLLGFAELKLAGSYLPSIQYWRGIKEALSANNAEVITASVPPTGSIEQRAAKLAKDIEAQARGKSVNIVAHSMGGLDARYMISHLRPASVNVKSLITVATPHHGSPFADYLIESIGPGYLPRLYDLWQRTTGWEPSAFSQLTTRYMVEEFNPKTPDNTTIRYFSYGAMVKHKPPLLSPFRHSHQVIEEREGPNDGLVSVESSKWGTYKGTLLGVNHLDLINWSNRLRFTVQKWMGHPPSFNAVAFYLDIGDMLAKEGL

SEQ ID NO: 671 - DNA, 1518 bp, Myceliophthora thermophilia
  CDS (1)...(1518)
atgaaatacggagagcaatttgagagggagtccgtgcctcaatggagccttcataacatcgactacaattcgcttaaacatcacatcaaggcgcacactaccagggaccaggccacggcaataacaattccaggctgcccgaacacggcactgacaaaattcgaagacgatttttatgaagagctgtgccggcaacatgatcgggtggatttgttcgtctcgagcaaggccgacgagatttcacggcggctgcagcacctttcgacccagttacaccgactcatcctgcgatgcgcgacttcgggacgggaccagatgcccttgaagaggcggcaacgcttcgccaagtacgaacaaaacttactacaatgcggcgatgacatcagggcgcttcaacgcttcgtcagcgcccaggtagttgcgtttcggaaaataataaagaagtacaggaaatggacaggctccgtaacactgggagctcgcttcaatgaccacgtcctgtcgcaccccaagagctttacaaagcgtgactttaatcagctccaggctcggtatgaggacctgctacagacattacgcgctgcgtcacccgctggcggtgttagctttccgcgtccaaaaccccggtcctcccgttcgcccgctccacagttctcaccagccgagcggactgccgccttggagccacaaccgccaacaggctactggaatgagtacgagtgtggcagcgaggcaggggactttgaccgcaacggcgatgagtacgcaatctacattgatccgaaccaggacactagcttcccgggtttcaaggctctcggcgcgttcttcgcagagtccgcccagaaactaagcagctgggtctcgtctcgacgcaagcgcgattccgcagctgtcgatatagccggtacagagcgccggcccctcctccatgatcatcagcccagcgacgcgggctacggctccaccgcgatcccttcagaatcaagtggcccctccagcccgccaggcgggacgaacatctacagcaccggcacggcagcaggcaccgacacggacctcgaggtccagcggacttcgtcgtcgcgccgcggctccatcagcagggggtacgtgtcgtcgtcatcatcggacgagcctttcttccggccgggcgccagagaggagacgtactacgcgggactgccgagcatcgcggaccagcgcatggcgcggtaccgcgagcacgtgctgggctgggcgacgtggggttgctttggggccgccttcgcgctgatgggcctcgcagccgtgctgatcgccaccgggcgccacaagatgaggctcgaggtggatgccggggtcacacttgggatcgtgacgagcctgggcctggcgtgcggcggcttgagcatgttgagcgcgcggactggtacgcctgggttgctggatcgtttggcggtgtggcttgcatttgcagtggtctgtgtgggagatggcatattgttggtcttggtcatgggaaacgcgaggaggtga

SEQ ID NO: 672 - protein, 505 aa, Myceliophthora thermophilia
MKYGEQFERESVPQWSLHNIDYNSLKHHIKAHTTRDQATAITIPGCPNTALTKFEDDFYEELCRQHDRVDLFVSSKADEISRRLQHLSTQLHRLILRCATSGRDQMPLKRRQRFAKYEQNLLQCGDDIRALQRFVSAQVVAFRKIIKKYRKWTGSVTLGARFNDHVLSHPKSFTKRDFNQLQARYEDLLQTLRAASPAGGVSFPRPKPRSSRSPAPQFSPAERTAALEPQPPTGYWNEYECGSEAGDFDRNGDEYAIYIDPNQDTSFPGFKALGAFFAESAQKLSSWVSSRRKRDSAAVDIAGTERRPLLHDHQPSDAGYGSTAIPSESSGPSSPPGGTNIYSTGTAAGTDTDLEVQRTSSSRRGSISRGYVSSSSSDEPFFRPGAREETYYAGLPSIADQRMARYREHVLGWATWGCFGAAFALMGLAAVLIATGRHKMRLEVDAGVTLGIVTSLGLACGGLSMLSARTGTPGLLDRLAVWLAFAVVCVGDGILLVLVMGNARR

SEQ ID NO: 673 - DNA, 2292 bp, Myceliophthora thermophilia
  CDS (1)...(2292)
atgaacagcgtcgggcgcgaagcaaccaccacaaccgccgcccaagatgacgacaatggggattccgccatcttctcgcagaccaacgtcgccatctgggtcttgacatctgcctccggcgccttcctcgccgtccgcctgtggtgccgacaccgattctcgaagctgtggtgggacgactatgtgctctctctatcatgggccatcctgctggtcgcggccgccctgatgagccgcacgatttcgtctggctatgccaccgatgatgacaagcgccgcttcttcctcttccaaaacacggcgacctcgatgaccacgctcgcaactgcctggaccaagatcgcctttgccatcaccctgtgtcgcatcgtccggaaccgctatctcctcgccttccttgccttcgtcattgtcacggccaatttgatcctcatcccgggcatgatgtccatctggatccccgcttgcgaagacccccgagccttcctgcggcccgagcatatcctctgttataggctcagagatctccaatatctcggcggcacgacgattgtgtacggcggcgtcatcgacgtcttgcttgccctgtttccctggttcatcatccggaggctgctgctcgagacccgggaaaaggtcggcctgacactggccatgagcctcggcgccataacaggcatcatcgtcatcttccgcgccttcttgcagttcagggacatcgacaacgattatcatttcatggtcttcatgtccatcttcaactttctcgagccgggcgttaccatcatcgcccaggctattccaatgtttcgcgtactggttgtcaccgtcaagagaggctcaagtgcgacgacgagcggtccggttgagggacatgctgcgtctgtcgccaaggaagtttctgaatatctcggcattccctatgctctaccacccgtgggagatttgcgatttcagccccctgtccgctacaacgggtcgaggaagatcgtgggcaaggactttggcgcggcatgctttccctccaatattagcgcttacgacgccgacttccccaaggagctgattgacggctatggaattacagaggtcgggcgcaggatcctcgcaaccatcacgaatcccggcataccagtgagcgaggactgcttaaccctgaatgtgtggaccaagccacagaccagcgaaaagcgtaaacccgttatggtctatatccatggcggatcttttgtttcgggtagctcggccgtcccggcgtataatggccaattctttgctgaccaggaagatgtggtcttggtgaccatcaattatcgcgtcaccttcttcggcttccctggcaaccctcacggtcaccagaacctcggcctgctcgaccagcgcatggcagtcgaatgggtccgggacaacatcgccgccttcgggggtgacccctcccgcatcatccttttcggcgagtcggccggcggcgcctcggttgaccactactccttcgcctgggcacacgatcccatcgtctccggcctaatccccatgtccggcacagcggagggcattgccccgctcccggccgcggtcgcctccgagctctggtacaacaccaccgccgccctgggctgcggtaatgcctccacaaccgaccaagccgccgtcctcgcctgcatgcagtcggtccccgccgagtcaatcgtcgccaccctcatcaacacgatcgagtcccccaccccgatgccctactcgccgaccatcgacggcgtccttgtcggcctcttccgcgtcttcgtgcagccccggccggacctcccccgcgaggagaagacgcgttttgcacgccgagaaccagcgcacttcgtctgccacgccgcccgccgcgccgcccgcgccggcaaccccacctggcgctaccgctggcacggcgtgttccccaacacggagctgtcgcgcaccccgcccagcggggcctaccacgactcggaggtggcgctgctgtttgggaatgtggaccagtccttggttacgaacacgcgggaggaggacgccgtcgggaggtacatgcggggcgcgtgggctgcctttgccagggacccggtccgggggctggagaggtatcctctcgaggccgacacggggcgtaaggggaagggagagggaaagggcaaagggagagaagggaaggggaagaaggggtggccgagatatgtggctgggaagcggacgctgatccggcttggatggaagggcagggctggggcgagcttggcgaggggagacttctacgatgacgactgctaa

SEQ ID NO: 674 - protein, 763 aa, Myceliophthora thermophilia
MNSVGREATTTTAAQDDDNGDSAIFSQTNVAIWVLTSASGAFLAVRLWCRHRFSKLWWDDYVLSLSWAILLVAAALMSRTISSGYATDDDKRRFFLFQNTATSMTTLATAWTKIAFAITLCRIVRNRYLLAFLAFVIVTANLILIPGMMSIWIPACEDPRAFLRPEHILCYRLRDLQYLGGTTIVYGGVIDVLLALFPWFIIRRLLLETREKVGLTLAMSLGAITGIIVIFRAFLQFRDIDNDYHFMVFMSIFNFLEPGVTIIAQAIPMFRVLVVTVKRGSSATTSGPVEGHAASVAKEVSEYLGIPYALPPVGDLRFQPPVRYNGSRKIVGKDFGAACFPSNISAYDADFPKELIDGYGITEVGRRILATITNPGIPVSEDCLTLNVWTKPQTSEKRKPVMVYIHGGSFVSGSSAVPAYNGQFFADQEDVVLVTINYRVTFFGFPGNPHGHQNLGLLDQRMAVEWVRDNIAAFGGDPSRIILFGESAGGASVDHYSFAWAHDPIVSGLIPMSGTAEGIAPLPAAVASELWYNTTAALGCGNASTTDQAAVLACMQSVPAESIVATLINTIESPTPMPYSPTIDGVLVGLFRVFVQPRPDLPREEKTRFARREPAHFVCHAARRAARAGNPTWRYRWHGVFPNTELSRTPPSGAYHDSEVALLFGNVDQSLVTNTREEDAVGRYMRGAWAAFARDPVRGLERYPLEADTGRKGKGEGKGKGREGKGKKGWPRYVAGKRTLIRLGWKGRAGASLARGDFYDDDC

SEQ ID NO: 675 - DNA, 693 bp, Myceliophthora thermophilia
  CDS (1)...(693)
atgaacgtctttcctggtaccgcgggtattacggcgtgggcccagacagagcaagcggtgcagagcgttgaagatgtgatcgaagagcacattcttccaaaactggatcccgactttctcgagtattttactcaatctgcatcgctgctcaatgccaacccagcttccgtctcggtcggtggcatatccgcgggcggacatatcagcatagtgctacagcacatggcgcgggatgctggcattcccttgaagttatgcatggctactgcgccaccagcaacgagagcgctgagctatacttactacactgagtcgccgttcccttctttccacgagttccaccgtgggcctgtgctgccctgggcgcaaatcaaatactatggacgcctttgcatgccaccggagaagcttccagagctcaggaagctgtggcccagctggtggctcgagcccctcgaggcgcctaactggcgcggcctttgcgacgccttcattcggacggccgagctcgaccccctgagagatgaaggcgaggcttacgcgatgaaacttgttgcgggtgggaacaaggtcactctcaagagatacttgggctgcccccacacattcgtgtacatggacgccctgaagcggaagcacgagtatgaccgtgattcaatcgctgcgttgagagtggcacacggtctcgattga

SEQ ID NO: 676 - protein, 230 aa, Myceliophthora thermophilia
MNVFPGTAGITAWAQTEQAVQSVEDVIEEHILPKLDPDFLEYFTQSASLLNANPASVSVGGISAGGHISIVLQHMARDAGIPLKLCMATAPPATRALSYTYYTESPFPSFHEFHRGPVLPWAQIKYYGRLCMPPEKLPELRKLWPSWWLEPLEAPNWRGLCDAFIRTAELDPLRDEGEAYAMKLVAGGNKVTLKRYLGCPHTFVYMDALKRKHEYDRDSIAALRVAHGLD

SEQ ID NO: 677 - DNA, 1503 bp, Myceliophthora thermophilia
  CDS (1)...(1503)
atggcgtcctcattcctcatcttcctcgccggcaccgtagcctacgccctcttccgactcagcagggtcgggagaagaccaaaagggtgcccacctggcccccctacgttgcccatcctcggaaatctgcatcagatcccaaagaagaacgcccacgtccagttcaagaaatgggctgacgagtacgggccgatctactcgctgatcctggggaccatcgtgaccatcgtcctgtcgtccgacgaatacggaaatcaatggcgccgcatccgaaagttctttcacgccttcttgcaactcaaggcgatcaaggcgtacgtgccctgcctggagcttgagagcacgtcggtcatggcggacctcttggacaagccgcagctcatcttccaccatatccggcggtacacaaactcggtatccacgcagctggtccacggatttcggacgcccaggatcgatgatccgaagctcctcctgatgtacgacaccatggagaagttcggcgacgtcaccggggcgggggctgcggccctgctcgacgtcttccccgtcctgcgctatctaccgccgggcatccggccgctctataatcatgcactctccattcggaaggcgtcgctcgatcttgccggtgacctttggtttgaggccaagcggaaagtgcgcgagggaactgccaagccctgtttctgcgtgggtctggccgatgcccaggccaaggaggacgttgacgacatgggactcgcaatgacagccagtacgggattggaagctgcctcggacacgaccgcgtgcatcctgtccggctttatccaggctatggttatctaccgcgacgcacaaaagaaagcgcaggaggcggtcgaccgtgtgtgcggcgacaggttcccaaccatggccgacatggataaccccgaggcgcaatacatcagggcttgcgtgaaggagattctgcggtggatgcccacggcaactctgggcgtgccacatgccgtcatcagagctgacgagtacatgggataccggattcccaagggcgcgagcgtcgtcctcagcatctggggcatccacaaagacgagaagagatataagaacccgcgggcgtttgacccgtcccgttacatggacgacacgacgacctcgagcgaatcggcactgggcccggatccgacaaagcgcgatcatttcggcttcggagcgggacatcgcatctgcgagggcatgcacgtcgtcgacaggaccctgttcctcttcatctctcgtcccgtttgggcctttgacctgtccccggccaaggatgccgacgggaacgacatcatccccaaccaggacgacttgatcggtaactttctgagacagcccaggccgttcccgctcggggtcaagccgcggagcgagtcgcgcgccgccgcggtccgtcaggcttggaaggacgcccaggaacttctcgatcaagatcagcaatggaaggagacgcccgaagggatgccattcaccttgtga

SEQ ID NO: 678 - protein, 500 aa, Myceliophthora thermophilia
MASSFLIFLAGTVAYALFRLSRVGRRPKGCPPGPPTLPILGNLHQIPKKNAHVQFKKWADEYGPIYSLILGTIVTIVLSSDEYGNQWRRIRKFFHAFLQLKAIKAYVPCLELESTSVMADLLDKPQLIFHHIRRYTNSVSTQLVHGFRTPRIDDPKLLLMYDTMEKFGDVTGAGAAALLDVFPVLRYLPPGIRPLYNHALSIRKASLDLAGDLWFEAKRKVREGTAKPCFCVGLADAQAKEDVDDMGLAMTASTGLEAASDTTACILSGFIQAMVIYRDAQKKAQEAVDRVCGDRFPTMADMDNPEAQYIRACVKEILRWMPTATLGVPHAVIRADEYMGYRIPKGASVVLSIWGIHKDEKRYKNPRAFDPSRYMDDTTTSSESALGPDPTKRDHFGFGAGHRICEGMHVVDRTLFLFISRPVWAFDLSPAKDADGNDIIPNQDDLIGNFLRQPRPFPLGVKPRSESRAAAVRQAWKDAQELLDQDQQWKETPEGMPFTL

SEQ ID NO: 679 - DNA, 2358 bp, Myceliophthora thermophilia
  CDS (1)...(2358)
atggacgacggcccgctgaagcagaagctcgcttcgtgctccgagaaggagatgaagaggagcgactggagcatatcgcaccgcggcggcgggacgttgcagtttccggagcatacctactcgtccatcatggctgggacaagaatgggggccggaatccaagagtgcgacgtcaccttcaccaaagacaagcagcttgtgtgccgccattcccagtgcgacctccacaccaccaccaatgtggtgaccatccccgagctgaacgccaaatgcaccgtcccgttccagccggcctccaacggcaccgcggccaaggccaagtgctgcacctccgacttcaccgtggacgagctcaagcagatgtgcgccaagatggactcctcgaacccggccgccgccacgccggctgagttcgtgggcggcaccccggcctacaggacggacctgtacgccaagacgacgtgcgagcggatcctgacggtgcgcgagtacatcgacctcgtcgacggcctggggctcaagttcaccgccgagctcaagacgcccgaggtgcccatgcccttcccgccgggcggcgactacacgcaggcccggttcgcgcagcagctggtggacgagttcaaggcggccaagatccgcccggagcgcgtctggctccagtccttcctctacgacgacctcctctactggatcaaggccgagcccgaatgggcccggcaggccatcctgctcgacgagagcgccaccacgccggaggccatgccgcaggcggtggcgcggctcgaggagtacgcccgggcgggagtccggatcatcgggccgccgctgccgtacctggtcaccgtcggggacgacggcgagaagatcgtcccgagcgcgtacgcgcggagggccaaggagctcgggctcgacatcatcacctggaccctggagcgcagcggctggctgggcgacgggtcccatggcggctactactacctcagcatcgccaacgtcacggacagcgagggggacgtgtacaacctgctgcacgtgctggcccaggacgtcggcgtgcgcggcgtcttttcggactggagcgccaccgtcacctactatgccaactgcttcggtctcatgttgaccgcagcggcatcgtcctcgtggcgctcgacgcaatgtccaaacgagccgggtcggagactccacgaagccgccgagaccaaggactgccccgtcccggggaggatcgggatcgtgcacggcggcggcggcaaggacgatgacggcaacgccatgacctggaccgtgcccccgagatgcctggaccaggcctccaagagggacaactcgccttcccgggtggactgcctcttcacctcggccgagttccgcaacggccacggcatcagcctggtgaccagcaccaccagcgcctcccatctgatcggcctggaagcctttgtcgacaagcccatgccccagccccacgcctcccggaaggaggacgcctcgctcgggcccgcctacgagatcgttcctgttgagggcaaaggcgtgggcgtggtggcgaagcgacggatccgcaggggcgagatcatcatggtcgatgtcccctccgtcctgatcggcatccccttcctggccgatgccaagccgcaccaccggcgccgtatcctcaagcaggcactgaaccagctgcccgaggagaccaggaaccgggtctatacgctcggtcgaggctcgtcgccgtacgaggtggacgccattatgggccccaacacgaacaccgtcgtgatagcggacgacgaagtgcatgtgggcctgttcacagaggtagcgagaatcaaccatgcctgcagaccaaacgcatactaccgcttttctgagcggcgcttgaccatggaagtggtcgctttccgtgccattgaagcgggggaagagattctcatgagctatgtgcccctggagacgccggcggaagagcgccggaggtacctgaggaaccactggggtttcgagtgttcctgctcgctctgccgcgcttcccagctggacctcgacaactccgaggtctggaggagcaaggtcaagagcctgaaggagacgatcctgaacgcgaggagcgagggcttctaccagaacgccatcaccatgaccgaggagtggctcatggtctccgagtgggacatgaccccgcccctgatggccgagtaccacgacacgctcgcggacctgtactttctgaagggggacatggtcaacgccacgagatacgctcgcatggccgtggatggctgggcgcggctgggcagcgtggatgacgagcaactcgagaggtccaggctgtttctccgccgcataatagatattaattag

SEQ ID NO: 680 - protein, 785 aa, Myceliophthora thermophilia
MDDGPLKQKLASCSEKEMKRSDWSISHRGGGTLQFPEHTYSSIMAGTRMGAGIQECDVTFTKDKQLVCRHSQCDLHTTTNVVTIPELNAKCTVPFQPASNGTAAKAKCCTSDFTVDELKQMCAKMDSSNPAAATPAEFVGGTPAYRTDLYAKTTCERILTVREYIDLVDGLGLKFTAELKTPEVPMPFPPGGDYTQARFAQQLVDEFKAAKIRPERVWLQSFLYDDLLYWIKAEPEWARQAILLDESATTPEAMPQAVARLEEYARAGVRIIGPPLPYLVTVGDDGEKIVPSAYARRAKELGLDIITWTLERSGWLGDGSHGGYYYLSIANVTDSEGDVYNLLHVLAQDVGVRGVFSDWSATVTYYANCFGLMLTAAASSSWRSTQCPNEPGRRLHEAAETKDCPVPGRIGIVHGGGGKDDDGNAMTWTVPPRCLDQASKRDNSPSRVDCLFTSAEFRNGHGISLVTSTTSASHLIGLEAFVDKPMPQPHASRKEDASLGPAYEIVPVEGKGVGVVAKRRIRRGEIIMVDVPSVLIGIPFLADAKPHHRRRILKQALNQLPEETRNRVYTLGRGSSPYEVDAIMGPNTNTVVIADDEVHVGLFTEVARINHACRPNAYYRFSERRLTMEVVAFRAIEAGEEILMSYVPLETPAEERRRYLRNHWGFECSCSLCRASQLDLDNSEVWRSKVKSLKETILNARSEGFYQNAITMTEEWLMVSEWDMTPPLMAEYHDTLADLYFLKGDMVNATRYARMAVDGWARLGSVDDEQLERSRLFLRRIIDIN

SEQ ID NO: 681 - DNA, 1575 bp, Myceliophthora thermophilia
  CDS (1)...(1575)
atgtttaaaacctacaccgccgccacttttctgctgccgaagcgactgaagctcgcctcgttgctccctccgcagcccaccgccctctcgaccgacgcctccctctccccgcaacaggaccctcgccagcccatcctcctcgcctcacaccaggccatgtcacaaacccgcgccgacagcccgcctcggccccagcgcccgatggcctacttcccgctggggtacaaagaagctgttcagcaatggtgggcgagtgtatcttctcgacaggccgagcgcaacgtcctcgccttcgtcccttacctccgggaagccagcgccgaaacggtggtgggctcgcaattacaggatctcgccaattgcgacccgttcggcctcagagtgtggaggacatccatggtggagctgtccggcaaaaaccgggccctgaacgagctgtcgatcgagcgcgtcggggagcaggcggacgataccttggtcatgcttcacggctacggcgccggcctcggtttcttctacaagaactttgagccgctcagccgcgcacgagggtggaagttgtacgcgctcgacatgctcggcatgggcaattcctcgagaccgcccttcaagatccgcgccaaggaccccaaggagaagattgccgaggcggagggctggttcatcgacgcgctcgaggagtggcgcaagatccgcaagatcgaaaagttcaccctgctcggccactcgctgggcggctatctcgccgtgtcctacgccctgaaataccccggccggctcaacaagctcatcctcgcctcgcccgtcggcgtccccgaggacccctgggccatcgactcctccatgcccgagccgcaagagtcgacgctggccaacgagttcacccaggaccaggagagcatcgtcaagggcgagcccgcccgagtccgcgccccggcggccgacaacaagtccaccaccaccatcgccgcccctcccaagcggcccatcccgagctggctcgtctggctctgggacgccaacgtgtcccccttcagcatcgtccgcatggccggcccgctcggcccgcgcttcgtctcgggctggaccttccgccgcttcaaccacctcccgcccgccgagaaggacgcgctgcacatgtacagctactcgctcttccgccagcgcggcagcggcgagtacgccctcccctacctcctcgccccgggcgcctacgcccgcagccccctcatcaaccgcatccaggacgtcggccggcaggtcctccgcccggccaccgacacgacccccgccgtgcgcgagaccggcatccccgtcgtcttcatgtacggcgagaacgactggatggacgtcgcgggcgggtacgcggccgaggagaagctcaagcagcgccgcgtccaggccctgctgaacgccaccgacgacgagaagcgcagggagaacgggtccgccaaggtgatcgtcgtccgcaaggccggccacaacttgtacctggacaacccggacgagttcaacgaggtcgtgctgagagagatggaggagacaaggcagagacgcttgaggttggggaagtga

SEQ ID NO: 682 - protein, 524 aa, Myceliophthora thermophilia
MFKTYTAATFLLPKRLKLASLLPPQPTALSTDASLSPQQDPRQPILLASHQAMSQTRADSPPRPQRPMAYFPLGYKEAVQQWWASVSSRQAERNVLAFVPYLREASAETVVGSQLQDLANCDPFGLRVWRTSMVELSGKNRALNELSIERVGEQADDTLVMLHGYGAGLGFFYKNFEPLSRARGWKLYALDMLGMGNSSRPPFKIRAKDPKEKIAEAEGWFIDALEEWRKIRKIEKFTLLGHSLGGYLAVSYALKYPGRLNKLILASPVGVPEDPWAIDSSMPEPQESTLANEFTQDQESIVKGEPARVRAPAADNKSTTTIAAPPKRPIPSWLVWLWDANVSPFSIVRMAGPLGPRFVSGWTFRRFNHLPPAEKDALHMYSYSLFRQRGSGEYALPYLLAPGAYARSPLINRIQDVGRQVLRPATDTTPAVRETGIPVVFMYGENDWMDVAGGYAAEEKLKQRRVQALLNATDDEKRRENGSAKVIVVRKAGHNLYLDNPDEFNEVVLREMEETRQRRLRLGK

SEQ ID NO: 683 - DNA, 888 bp, Myceliophthora thermophilia
  CDS (1)...(888)
atgttcggcctaacactcaacaccttgatcatggcgctggcctcgcctctcgccgtccaaggcgttcccattgacaccaccggcatcgcggcgcgtgcgtccgccccgctgggcaacggcgtgcccctgcgcatcatgccactgggcgcgtccatcacgttcggcctcaagtcgagcgacggcaacgggtaccgggccgcgctccgggacatgatcgtcaacccgcccgcggacagctactgcggcggcgcggcggcgccgggcaggggcagcgcgcaggacgaaatgttccagagcgtgcgctgccagagcaccgcccgcgtctcgtccagcccgtacaggtcacatggtcgatccctgatgcagcaccatgtcgactcgagggctggtcgggctaccgcatcgagcaggtccacgacaaggcccatggcggccgagtcggcgcccaagtacaagcccaacgtggtgctcgtcaacgcgggcaccaacgacgccgcgcagaacttccaggtcgccaccgcgggcgagcgcatggaggccatgctccgggacctctgggccgtctcgccgcgcgccgtcgtcgtgctgagcaccctgctcgtcaaccaggacgaggcgacggagcgcaacgtggtcgccatcaacaagcagctgcgcgccctcgtcgcccgcctgagggacgaggagaagaagaacatcgtcctcgccgagatgcacggccgccgcggcccgcgcctcgccgacctcgccgacggcacccaccccaccgacgagggctaccgcaagatggctaacatatggtacgccagcctgcgcgtcgccagcgaccggggctggttgcaagccccagagccggtcccgggcgtgcccgacgacggagcggcgtaa

SEQ ID NO: 684 - protein, 295 aa, Myceliophthora thermophilia
MFGLTLNTLIMALASPLAVQGVPIDTTGIAARASAPLGNGVPLRIMPLGASITFGLKSSDGNGYRAALRDMIVNPPADSYCGGAAAPGRGSAQDEMFQSVRCQSTARVSSSPYRSHGRSLMQHHVDSRAGRATASSRSTTRPMAAESAPKYKPNVVLVNAGTNDAAQNFQVATAGERMEAMLRDLWAVSPRAVVVLSTLLVNQDEATERNVVAINKQLRALVARLRDEEKKNIVLAEMHGRRGPRLADLADGTHPTDEGYRKMANIWYASLRVASDRGWLQAPEPVPGVPDDGAA

SEQ ID NO: 685 - DNA, 2382 bp, Myceliophthora thermophilia
  CDS (1)...(2382)
atggcaaacgacgccgaggcgctcagtcagccgcttacgtcgaggtataaggcctcgatcgattacgccaaagatgccgagggcatgaaagaatcggactacaagcggcgtgacctgccaacatatgcgcgcggcctgttcactactcagacgaagcaacacgtccccgagattgccattcgcggctacgacaagttcttcaacattgacgaggtccgagaaacctcctgggagcatattaaggagcgcaccaaaggcccttacgaactcagcctaaaggagaacggctgcatcatcttcattagcggtcttgaagacgacacactgctcgtctgcagcaaacactcgaccggtgacaggtctgatgtcgttgccagtcacgcaagggtgggtgagcagcacctcgaacgccagctagagaagattggcaagaccaagcaggacctggcgcgggagttgaggaaacggaatgccaccgccgttgccgagctgtgcgacgacagcttcgaggagcacatcctagcctacggtccagacaaggccggtctgtatctgcacggcatcaacatcaatatccccgagtttatgacatatccatctccactggtccagaaattcgccgaagactggggcttcatcaagaccggcctgattgtgatcgacgacatcaacgaagtgaaggccttcttggaggaggtcgccgagacgggagcccacgatggccgtgacgttgaaggtttcgtcatcaggtgcaagagatccagcaaaccgggcgaggttcccgatcaggactggttcttcaagtacaagttcgaggaaccgtacttgatgtaccggcagtggcgtgaagcgacaaaggctctcatctctggaaagcaattcaagctcaagaagcacgtcaagatcaccgaggagtaccttctgtacgctcgtcaacgcctggctgctgatccgcacttgaggaaggcttactgccagaatcatggaatcatcaagctgcgcaacgacttcctcgagtacaaaaaccttaaggggtctgatgccgccaacctcgaagacgacagcggtgcctcaaacgtgactcgcgatgtcatccttgttccaattgcgacgatcggctgcggcaagacaaccatcggcctcgcactcaccagcctatttggctggggccatattcagaacgacaacatcactgggtccaaacggcctccgcgattcgtgaaggcggtcctggaccagcttgaggagcatcccgcagtttttgccgaccggaacaatgccatgagacatgaacgaaagcagatgatcacggatgtcaagatgcatcatctggcggcgaaactggttgccctcaactttgtgcacgacgacattgatgccgtccgtcaagtcacccgagagcgggtgttcgcccgcggtgacaaccatcagactatccaggccgccacagacatgaacaaggtcgtcggtatcatggagggtttcattcatcggtttgagccgtgtgatcccgagcgtgagcccgactccgactttgatgccatcatcgatctggatcccactgccggatccagggagaacctcgaaatcgtgatcagggaactgcatcgccagttcccgaactttgtcaaggaagttccttctgccgaagacatggaccgggccgtccaaaacgccatcgacagctacaagcctgacctgcgtcacaatattcccgaccgctccaagaacgattccaagaagaaaaataaagagcagcagcagcaggaacagcagcaggctaacgagaagcccaaaaagaagaaaccactcgaatacatgtccgttgatgtccccaccgcggatgttctcacggctctcgaaaagaccttctcccaggaccttccggcgtcgaaaacccgcttcttcaaacaacttcaaggcactcgccgcgtgcaggccaagttccacgtcacactgatgcatcgtgctacagccaaggagcacccggaactctggcagcgctacacgaccctccaggacacggacggtgcgatccacccggacgggcggctgggcgagctggacgtgcagctcgagcgcgtggtctttgacgaccgcatcatggccatcgtcgtacgcctggtgcctacgaacccggaggacgagaacataaacgccgacaatccggcgctgccagcaaagcctaagtgggagtgcgtcaaccgtgtggcgcacatcaccgtcggcaccagagatgattcggtcaaacctaaggagagcaatgacctgctggcaaggtggctgaaagttggcagcggagaggagaccgggattggggagctgttgatcgaagggaagccgctcatcaggggcgtcgtgaggggtgtcttggcgagatag

SEQ ID NO: 686 - protein, 793 aa, Myceliophthora thermophilia
MANDAEALSQPLTSRYKASIDYAKDAEGMKESDYKRRDLPTYARGLFTTQTKQHVPEIAIRGYDKFFNIDEVRETSWEHIKERTKGPYELSLKENGCIIFISGLEDDTLLVCSKHSTGDRSDVVASHARVGEQHLERQLEKIGKTKQDLARELRKRNATAVAELCDDSFEEHILAYGPDKAGLYLHGININIPEFMTYPSPLVQKFAEDWGFIKTGLIVIDDINEVKAFLEEVAETGAHDGRDVEGFVIRCKRSSKPGEVPDQDWFFKYKFEEPYLMYRQWREATKALISGKQFKLKKHVKITEEYLLYARQRLAADPHLRKAYCQNHGIIKLRNDFLEYKNLKGSDAANLEDDSGASNVTRDVILVPIATIGCGKTTIGLALTSLFGWGHIQNDNITGSKRPPRFVKAVLDQLEEHPAVFADRNNAMRHERKQMITDVKMHHLAAKLVALNFVHDDIDAVRQVTRERVFARGDNHQTIQAATDMNKVVGIMEGFIHRFEPCDPEREPDSDFDAIIDLDPTAGSRENLEIVIRELHRQFPNFVKEVPSAEDMDRAVQNAIDSYKPDLRHNIPDRSKNDSKKKNKEQQQQEQQQANEKPKKKKPLEYMSVDVPTADVLTALEKTFSQDLPASKTRFFKQLQGTRRVQAKFHVTLMHRATAKEHPELWQRYTTLQDTDGAIHPDGRLGELDVQLERVVFDDRIMAIVVRLVPTNPEDENINADNPALPAKPKWECVNRVAHITVGTRDDSVKPKESNDLLARWLKVGSGEETGIGELLIEGKPLIRGVVRGVLAR

SEQ ID NO: 687 - DNA, 4518 bp, Myceliophthora thermophilia
  CDS (1)...(4518)
atggatacagtgaactcgactgccctcgcggcggcgacggctgtggcgggaaccgtcgaccgtcatcccaacccgctgtcgtcggccgttgctgcagctagcgatgtcgccaacgcccatggctcgtcttcgtggctcggcctcttcgcgaggctagttctctggattctgcagtttgtctcgatggtgctttactatgcaatcaagctggccaccatctcggtccctacactgctgtacaccctcttctcgacgagcttgacggtcaccatgaatgcgacaactctgatgctcatcattgcggccatgatagccgccatcagctgggttgtccgttaccgctacctcaacatgtactcgcggctgccccccgaaccccagcgcaaggagccggacgtcgacctcttccccgacagccacgaagagggcatcaagcccggcctgtccaactactttgacgaatttctcagcgccatcaagatcttcggctatctcgagcggcctgtatttcatgagctgacccgcagtatgcagacccggaagcttatcgccggcgagacattcaacctagaggaggagaaaggcttctgcctcgtcgtcgacggcctggtggagatttttgtcaagtcatcaaattacagccgccgctacgctcacagtccttacgccgcgagcgaggcgccttctagcgacgacgaacaccctgcccctggacagcaacgataccagttgctgaccgaggtccgaaatggcgctcccatgtcgtcgttattctcgatcatgtctctctttaccgaagacgtcccgctgcggcaaacagatgaagacgggtcggagcccggcaccgctcaccatagtgccctcttttcaaactaccctcagagtgcagattttcgaagacctccggtcagatcggactcgctcccgcccactcctcagctggaggagtctgcatcgaactcggtagagaacctgcctgagcacctcgaccctagcctcccccgtgttccccccatctcccttgacggcaatggcttccccaaacctcagagaccggttcccaagaggattagcaccacttcggctcatcccgacatcatcgcgagggcgacggtagacacgactgttgcgatcattcctgctagcgcctttcgacgattgatcaagatctaccccaaggccacagcacatattgttcacgtcattttgtcacgctttcagagggtcactcttgcaaccgcatacaactatctcggcttgtccaccgaggtcctgcaaatagagcgccagatgctcaagtacacgacccaccaactccccaaccatctccgtggggatgctctcgacagactcaaggaaaagttcaggcgagagagggagcggatcggcgaggtggatgtcagcaagggaatagctctgcacaatcctcgcgccggccgccggcgccgttcgacagccggtcttcggaaggaggcagcgttgcaggctttctccaagcagcgtactctctccatggctggctcgtcgtctctggtggtccctagtgcgggagatcttgcaacgcacctgcagcagtcgagaggaggcgccagcagatcgcagagcgttgcttttaccgatggatcggcttctcagttcgagctgcggagagaagccacgtctcctctggctcagcggtccttcgacccgtttgcgactcagcgaaatgtccatattccgctcgacaagagagacacgatggacgaggacaacttattccgcgagtcgatcctcgagtgtatgttcagggccatcggcctgaccggaaacagcggtctgaataaggacacggattcgaaccaggcctcgccacggctcatatcgcttgaacagcgacgccagaaaacgcactttaccaaccacgcctttggcttcatggatgggcttgatggatcgttcgacggcgagaccgagtcaatgacgtccgcatccatgccttcttcgccaaacccacagattctggcgcaagacatgcaggacgagatggagatcgtcttcttccccaaggggtcggtgttggtggaacaaggagagaggaaccccggtctatactatgtcgtggacggcttcctggacatctgcacccgagagattgcttcatcctccgacgccgcccatgctcatggcaggtcatcgatctatgctatggacaacgcccagccacgctatccctcacaccggtttgcggaccctatgcgcagtggcgataatgtagacggcgccgaagctagacccaagacgagtcgccgaagtgttggcttgatcaagcccggtggcctcgccggttacgtcggtaccatctcgtcgtacaggtccttcatcgaggtcgtggcgaagacggacgtctatgtcggcttcctcccgctcgcatccattgagaggattgtcgacaaatatcccattgtcctcctcgccatggcgaagaggctgaccaatctgcttccccggctgattctgcacatcgacttcgccctggagtggctgcaggtcaacgccggccaggtcatctaccacgagcgagacgagagcgaggccatctacattgtgttgaacgggcgcctgagattggtcgaagaccggaagggcggcggtatgaatgtcaaggccgaattcggccagggcgagagtgttggcgagctcgaggtgctcaccgagtcctcccgctccggcaccctgcacgccatacgggatacggagctcgtcaagttcccccgcacgctgttcaagagcctggctcaagagcacccgaatattaccatcaagatctcaaggatcatcgcgtcccgtatgagggcgctgatcgacgatccgtcgacgatgctgggcttcaaggatccttccggcaggagctcggtaaacaagagctcgaccacgctcaatctgaggactgttgccatcttgcccgtctctgctggcgtgcccgtagcggagtttggcaataggctgctcaatgctttgaccgaggtcggaactccaaacggcgccacgtcgttgaacagcgcggccgtcctgaaccatctcgggaagcacgcattcaacagaatgggcaagctcaagctatcgcagtatctggcggacctggaggagaagtacggactcgtgatctacgtggccgacacgaatgtcaacgctccttggacacaaacctgcatcgcacaagccgactgcgtcctcctagtcggcctggccgatggctcccccgaaatcggagagtacgagcgcttcatgctcggcatgaagtccactgcgaggaagattctcgtactcatccatcaggaacgcgactccaccccgggtctcacgaggaagtggctcaaaaaccgggtttggatcaacggaggccatttccacgtgcagatgacctacagtcccaacgcggtgccgatccacccgccagccaagccggggggcccgagtctccgggaacgagttcaggttctgcaagccgagatccaaaagtacacgtccaggaaattgcggcacagccccttctactctcccgacgcgccgttcaagggcgatttccaccggctggcccggcgtctgtgcggcaaatccgtaggcttagtcctcggcgggggcggcgcgaggggcctcgcgcacattggcatcatccgggcgatgcaggaggccggcatccccatcgacattgtgggtggcacctcgattggcgccttcatcggcgccctgtacgcgcggcacgccgactttgtgccgatcgtgaacgcggccaagaagttctcgggccgcatggccagcgtgtggcggttcgcgctcgacctgacgtacccgtcggcgtcgtacacgacgggccacgagttcaaccggggcatcttcaaggcgtttggcaacacgcagatcgaggacttctggctcgactactactgcaacacgaccaacatctccaagtcgcgggccgagttccacacgagcgggtacgcgtggcggtacgtgagggcgtccatgtcgctggccgggctgctgccgccgctgtgcgacgagggcagcatgctgctcgacggcggctacatcgacaacctgaccgtgtcgcacatgaagtcgctcggggccgacgtcatcttcgccgtcgacgtcggcgccctcgacgacgacaccccgcaggcctttggcgactcgctctcgggcctgtgggccttcttcaaccggtggaaccccttctcgtcggtgccgaacccgcccacgctggccgagatccaggcgcgcctggcctacgtcagcagcgtggacgcgctcgagcgggccaagacgctgccgggctgcatctacatgcggccgccggtggaggagtacgggacgctcgagtttggcaagttcaacgagatctacgccgtcggctacgagtacgggcaggagtttctggcgaagctgcgggagcgcggggtgctgcctctcggggaggagatgggcggcaagaaggcgctcaggaggacgatggcgccgaggagggcaagcatatag

SEQ ID NO: 688 - protein, 1505 aa, Myceliophthora thermophilia
MDTVNSTALAAATAVAGTVDRHPNPLSSAVAAASDVANAHGSSSWLGLFARLVLWILQFVSMVLYYAIKLATISVPTLLYTLFSTSLTVTMNATTLMLIIAAMIAAISWVVRYRYLNMYSRLPPEPQRKEPDVDLFPDSHEEGIKPGLSNYFDEFLSAIKIFGYLERPVFHELTRSMQTRKLIAGETFNLEEEKGFCLVVDGLVEIFVKSSNYSRRYAHSPYAASEAPSSDDEHPAPGQQRYQLLTEVRNGAPMSSLFSIMSLFTEDVPLRQTDEDGSEPGTAHHSALFSNYPQSADFRRPPVRSDSLPPTPQLEESASNSVENLPEHLDPSLPRVPPISLDGNGFPKPQRPVPKRISTTSAHPDIIARATVDTTVAIIPASAFRRLIKIYPKATAHIVHVILSRFQRVTLATAYNYLGLSTEVLQIERQMLKYTTHQLPNHLRGDALDRLKEKFRRERERIGEVDVSKGIALHNPRAGRRRRSTAGLRKEAALQAFSKQRTLSMAGSSSLVVPSAGDLATHLQQSRGGASRSQSVAFTDGSASQFELRREATSPLAQRSFDPFATQRNVHIPLDKRDTMDEDNLFRESILECMFRAIGLTGNSGLNKDTDSNQASPRLISLEQRRQKTHFTNHAFGFMDGLDGSFDGETESMTSASMPSSPNPQILAQDMQDEMEIVFFPKGSVLVEQGERNPGLYYVVDGFLDICTREIASSSDAAHAHGRSSIYAMDNAQPRYPSHRFADPMRSGDNVDGAEARPKTSRRSVGLIKPGGLAGYVGTISSYRSFIEVVAKTDVYVGFLPLASIERIVDKYPIVLLAMAKRLTNLLPRLILHIDFALEWLQVNAGQVIYHERDESEAIYIVLNGRLRLVEDRKGGGMNVKAEFGQGESVGELEVLTESSRSGTLHAIRDTELVKFPRTLFKSLAQEHPNITIKISRIIASRMRALIDDPSTMLGFKDPSGRSSVNKSSTTLNLRTVAILPVSAGVPVAEFGNRLLNALTEVGTPNGATSLNSAAVLNHLGKHAFNRMGKLKLSQYLADLEEKYGLVIYVADTNVNAPWTQTCIAQADCVLLVGLADGSPEIGEYERFMLGMKSTARKILVLIHQERDSTPGLTRKWLKNRVWINGGHFHVQMTYSPNAVPIHPPAKPGGPSLRERVQVLQAEIQKYTSRKLRHSPFYSPDAPFKGDFHRLARRLCGKSVGLVLGGGGARGLAHIGIIRAMQEAGIPIDIVGGTSIGAFIGALYARHADFVPIVNAAKKFSGRMASVWRFALDLTYPSASYTTGHEFNRGIFKAFGNTQIEDFWLDYYCNTTNISKSRAEFHTSGYAWRYVRASMSLAGLLPPLCDEGSMLLDGGYIDNLTVSHMKSLGADVIFAVDVGALDDDTPQAFGDSLSGLWAFFNRWNPFSSVPNPPTLAEIQARLAYVSSVDALERAKTLPGCIYMRPPVEEYGTLEFGKFNEIYAVGYEYGQEFLAKLRERGVLPLGEEMGGKKALRRTMAPRRASI

SEQ ID NO: 689 - DNA, 510 bp, Myceliophthora thermophilia
  CDS (1)...(510)
atgcttcgccatctcaacaacctcctcatcctcctccgcctccgtcgcgcctccccctggaatcctcggaccccgctcgactggctgctcgcctccccgctccagtggctcacctcgctgctctaccgccacgtcctgctccccctccgcggccggcccttccatcctccgtcgcggcacggccggggcccggtcggcagcagcagcagcagcagcagaagcagcagcaggtggaggaggaggcgcccgatccgcgtcgtctgcctctccgacacccacaacctcgtcccggaccaccgctcccccaccaccgccatcccggacggcgacctgctcatccactgcggtgacctgaccgtcggcggaacaccggccgagatccagcggcaggtcgactggctgcgcgggctcggccatcgctggaaagtcgtcgtcgggggtaatcacgactcgtggctcgacgagcgggtgagaacgcggacgggtgaagaggagggcggggatgtatga

SEQ ID NO: 690 - protein, 169 aa, Myceliophthora thermophilia
MLRHLNNLLILLRLRRASPWNPRTPLDWLLASPLQWLTSLLYRHVLLPLRGRPFHPPSRHGRGPVGSSSSSSRSSSRWRRRRPIRVVCLSDTHNLVPDHRSPTTAIPDGDLLIHCGDLTVGGTPAEIQRQVDWLRGLGHRWKVVVGGNHDSWLDERVRTRTGEEEGGDV

SEQ ID NO: 691 - DNA, 900 bp, Myceliophthora thermophilia
  CDS (1)...(900)
atgccaccgtttggccccgttcatattctcgagccccgggctgaacacactcacaccatcatcttgcttcatggccgcggcagcaatggcgaggagtttgcccaagaattacttgagtccaaactctccaacgggaacacactgcaggaacaactcccgacttggcgatgggtcttcccttcgtccgcagagctctgtagcaccgctttccaggagacaatgccggcctggttcgaggcacactctctgaccgacgtcgcctcaaggcaagatctgcagatggccgggatacgcgactcggtacagtacgtgacccgtttgctggacgaggagacggagaggatgggtggggcagctcacagggttgtgctgggcggcatcagtcagggaggcgcggtcgccatgtggaccttgctgtgtgcaggcgatagagacgtcgcccgacgcttgggagggtttgtgggcgcaagcacctggctccccttcgccgagaacctcgagcggtatctgggcggacagaacaggacgaaccacgacgccccggggaacaacgaggccatgggggatgacgtcacgggaggcggcggcgacgacgacgacgacgtcgtccaagtcagtgaggctgatgcgttcgtgaaggccatgaccgcttccgcgagacggactcggcaccagcgtgacgcttctgaggccgaccagcatcctgttccggtgtttctggcccacgggacggacgatgcttttgtggatgtcgagctcggacggcacgcggcacgcgtgttgaggaaagaaccggaggagttcgatgatattttggccgacccgcaccggaggacctcagccgatgtgccctgcaaacaccgcagggagcagggccgcaaacgcgtcttggttggttag

SEQ ID NO: 692 - protein, 299 aa, Myceliophthora thermophilia
MPPFGPVHILEPRAEHTHTIILLHGRGSNGEEFAQELLESKLSNGNTLQEQLPTWRWVFPSSAELCSTAFQETMPAWFEAHSLTDVASRQDLQMAGIRDSVQYVTRLLDEETERMGGAAHRVVLGGISQGGAVAMWTLLCAGDRDVARRLGGFVGASTWLPFAENLERYLGGQNRTNHDAPGNNEAMGDDVTGGGGDDDDDVVQVSEADAFVKAMTASARRTRHQRDASEADQHPVPVFLAHGTDDAFVDVELGRHAARVLRKEPEEFDDILADPHRRTSADVPCKHRREQGRKRVLVG

SEQ ID NO: 693 - DNA, 711 bp, Myceliophthora thermophilia
  CDS (1)...(711)
atgaagttcgcccttttcgctgccctcttcgaggccgtggccgtcacggtcaccagcgcctatcccgtcaccgccaacggcgggcttagctgccgctccggccccggcaccagctatgccgtcaagaagacctacaagaagggtttcgatgtcaagatcagctgccagaccactggcacctcggtcaacggcaacaacatctgggataagacccaggatggctgctacgtcgccgactattacgtcaagaccggcaagaacggctttgtgaccagcaagtgccctgctagcggcggcggtggcggcggttccaccaagcttcccggccccgtcaagaacgactatccctacaagaacaactgcggcggcgtcgacccctggaaatactacaagtgccagtgcacctccttcgtggcgtggcgcatcaacgagcgcctgggcatcaagttccacaacatgtacaagggcgtcaactggggtaatgccaacacctgggacgatgccgccaagcgcaccggcgtcaaggtcgacaagactcctaagcccggcgctattgctcagaccaacgccggccggtacggccacgtcgcctgggtcacggctgtcaatggcaacaaggtcaccatcgaggagtacaactgggccaagcgcgagggctatggcacccgcaccgtcgacaagagcaccttcaactacattcatctcaaataa

SEQ ID NO: 694 - protein, 236 aa, Myceliophthora thermophilia
MKFALFAALFEAVAVTVTSAYPVTANGGLSCRSGPGTSYAVKKTYKKGFDVKISCQTTGTSVNGNNIWDKTQDGCYVADYYVKTGKNGFVTSKCPASGGGGGGSTKLPGPVKNDYPYKNNCGGVDPWKYYKCQCTSFVAWRINERLGIKFHNMYKGVNWGNANTWDDAAKRTGVKVDKTPKPGAIAQTNAGRYGHVAWVTAVNGNKVTIEEYNWAKREGYGTRTVDKSTFNYIHLK

SEQ ID NO: 695 - DNA, 609 bp, Myceliophthora thermophilia
  CDS (1)...(609)
atggctcgattctctaagcttgccgtcggcctcctcatggtgtctttggcttctgtggcctgcaccaacccggccaaacgcagggcatggcataccctgagcaacgatgagaagcaggtgtacatccaggccgagctttgtctcatggagctgcccgccaagctgagcttcccggcggcccggacgaggttcgacgagctccaagtcatccaccagctccaggcatatgccacccatttcgtgggggcggccacggcggcgtggatgctcaacggtgtctcgagccccggcgaccctctattctacctacacaacacatggctggacaaggtgttctgggactggcaggccagggacaggtcgacgcgcacgacgaccatcggcgggaccaacatcgccccggacgcgccgccgggcttccccacgcggccctcgaatatccccaagcctgctggtgccgacggcaaccctggcaaaaccaccacgctaagccatgtgctcaacatgtacggcaatatgcccaacgcgacggtgggtgacgtcttggacattcagggcgactttgtctgctacgagtacgtcgagccagaggaggaggtgacggtatga

SEQ ID NO: 696 - protein, 202 aa, Myceliophthora thermophilia
MARFSKLAVGLLMVSLASVACTNPAKRRAWHTLSNDEKQVYIQAELCLMELPAKLSFPAARTRFDELQVIHQLQAYATHFVGAATAAWMLNGVSSPGDPLFYLHNTWLDKVFWDWQARDRSTRTTTIGGTNIAPDAPPGFPTRPSNIPKPAGADGNPGKTTTLSHVLNMYGNMPNATVGDVLDIQGDFVCYEYVEPEEEVTV

SEQ ID NO: 697 - DNA, 1950 bp, Myceliophthora thermophilia
  CDS (1)...(1950)
atggcggcccaaacgaagaggcatccgagcctcaaccactacgacatcgtcatcgtgggcgccggccccgttggcttgatgctgtcaacctgcctggcgagatggggatacaggatcaagcacatcgacaacaggccggagccgaccccaactggtcgggccgatggtatccagccccggtcgcttgacttgctccggaacatggggctcaagtccgccatcatggccaacaagcccgcccgcgtctacgaggttgccttctgggacccgccaaagtccggcaagggaattgtgcggaccggcacctgggctagctgccccagctttattgacgctagatacccttttaccactcttcttcaccagggcctgattgagcgcgtcttcatcggcgacctcgaaaagaatggcgtcagcatccagcggccatggaccatcaagggcttcacctcgaacgagaaagaggaccccgagtaccccgtcaccgtcgacctggagcacgttgatggcaccttcaaggaaaccgtcaaggcgaagtatctgttcggtggcgaaggttctcggtccttcattcgtgaccagctgaagatcggcatcaagcacaaagaccccatcgcctatgtatggggtgtcatggacggcgttgtcaagaccgatttccctgatatcaagatgaaatgcacgattcactcggagcacggttccattatggtcattccccgcgagaacaacatggttcgcctctacatccagatcgcatcctccaccgacccggacttcaacccccggaagacggcaaccgccgaggaagtccaggcttccgctaagcgcatcttgcagccctattccatcgagtgggagagggtggagtggtactcggtctaccccatcggccagggcatttccgacaagtacactctagaccaccgggtgttcctgggtggcgatgcctgccacacccacagccccaaagccggtcagggcatgaacacggcgtttctggatgcgctgaacctggcatggaagatccacgccgtggaggccggctttgctaaccgcagcttactcgagacctacgagcccgagcgcaagacggtcgccgagaacctgcttgcctttgacaacaagtacgccaagctcttctcagagcgcccgcccgccgccaacgaggtcgccgccgcctccgcccataccaacaacaacgacaagaacaaggccggcggccaggaagagaacgagttcatcaagaccttcaaggaatcctgcgagttcaccagcggctacggcgtcttctaccagcccaacgccatcaactggtcgccctcccacccggcccagtcccacgtcgtccaccccaagagcaccaagctcgtcccgggccgcctcttcatcatcgccgacgtcacccgcgtcgtcgacgccaacgtcgtccacctcgagcaggaggtccccctcaacggctccttccgcctcttcgtcttcgccggcgcgcccgccgtcaccgcccgcgccctgcgcgatctggccgacaacatggccaagcggaactcgttctactcggcctacgccttcccggacgcggtccgcgagcaaatcagccaccacgagcgccacaatccgcactcgcccttcttcacggtctgcaccgtcttcgccgccccgcgcgcctcgatcgagatcactcgcgaggtgcccccgctgctggcgcgctaccgcgaccacatctacgccgacgaccgctgggaccgccgcgtccccgacgcccgcgcctgcgcccacgccaagatgggcctcgacgaggaccgcggcggcgtcgtcgtcgtccgccccgacggctacgtcggcatcgtcgtcgccctcgaggagggcagcgccaccgtcgacgcgctcaatagctattttagcgccttctgcactaagaagctaggcgagacgcaggcgcagctttga

SEQ ID NO: 698 - protein, 649 aa, Myceliophthora thermophilia
MAAQTKRHPSLNHYDIVIVGAGPVGLMLSTCLARWGYRIKHIDNRPEPTPTGRADGIQPRSLDLLRNMGLKSAIMANKPARVYEVAFWDPPKSGKGIVRTGTWASCPSFIDARYPFTTLLHQGLIERVFIGDLEKNGVSIQRPWTIKGFTSNEKEDPEYPVTVDLEHVDGTFKETVKAKYLFGGEGSRSFIRDQLKIGIKHKDPIAYVWGVMDGVVKTDFPDIKMKCTIHSEHGSIMVIPRENNMVRLYIQIASSTDPDFNPRKTATAEEVQASAKRILQPYSIEWERVEWYSVYPIGQGISDKYTLDHRVFLGGDACHTHSPKAGQGMNTAFLDALNLAWKIHAVEAGFANRSLLETYEPERKTVAENLLAFDNKYAKLFSERPPAANEVAAASAHTNNNDKNKAGGQEENEFIKTFKESCEFTSGYGVFYQPNAINWSPSHPAQSHVVHPKSTKLVPGRLFIIADVTRVVDANVVHLEQEVPLNGSFRLFVFAGAPAVTARALRDLADNMAKRNSFYSAYAFPDAVREQISHHERHNPHSPFFTVCTVFAAPRASIEITREVPPLLARYRDHIYADDRWDRRVPDARACAHAKMGLDEDRGGVVVVRPDGYVGIVVALEEGSATVDALNSYFSAFCTKKLGETQAQL

SEQ ID NO: 699 - DNA, 720 bp, Myceliophthora thermophilia
  CDS (1)...(720)
atggtcactgtcagcagccttgttgccgccgcgggcgtggtcctcctggctggccaggaggtctttgctgtgcagctcaccagggtcgattaccctaacaatgccacgtccagggcggagatgtacatctatgttcccgacaacgttgtcgagtcgccgccgctggtagtggttcgaacccgggggacgtgctgggacgtgtcgtcgccgcggtcgctggagcgcgggggcgggggcgggggcgactcgcaggccatcgccgacatgatcctgcacgcggtggccgagtacggggcggacgcggcgcgcgtctacctgacgggcggcagctccggcgccatgatgggcaacgttcatggccgcgacgtggccgcgtggaacaacacgtgcagcggcggccggagcatggccagcccggagcagtggggcaacgtggtgagggacatgtatcccgggtatgaaggcccccggcccaaaatgcagatctggcacgggagtgccgacagcacgctcgcgccggccaactacgaggagacgatcaagcagtggacgaacgtgtttggggtgagccaggagccgacaaactcggtcgagaactatccggcgcccaactaccggacggatgactacggggagaacgttcagggcatctttgcgaacggcgtcgggcatagcgtgccggcgaacctgacggccagcgaggcctggttcgggctgtga

SEQ ID NO: 700 - protein, 239 aa, Myceliophthora thermophilia
MVTVSSLVAAAGVVLLAGQEVFAVQLTRVDYPNNATSRAEMYIYVPDNVVESPPLVVVRTRGTCWDVSSPRSLERGGGGGGDSQAIADMILHAVAEYGADAARVYLTGGSSGAMMGNVHGRDVAAWNNTCSGGRSMASPEQWGNVVRDMYPGYEGPRPKMQIWHGSADSTLAPANYEETIKQWTNVFGVSQEPTNSVENYPAPNYRTDDYGENVQGIFANGVGHSVPANLTASEAWFGL

SEQ ID NO: 701 - DNA, 3606 bp, Myceliophthora thermophilia
  CDS (1)...(3606)
atgaagtttgggcggaatctcccacggaaccaggtccctgagtgggcgggttcctatatcaactacaagggactcaagaagcttatcaaggccgccgtcagggcagctcagaatggagaaccggtcgacctagcggagttctttttcgacttggatcggaacttggaggacgtcgactcgttttacaacaaaaaatatgccgacgcctgccggaggcttaaagtgctccaggatagatacgggacctcgcccgaagtggttgccaatctcgacgatgacgagattgaggaactgatgggcgccctgcttgagctgcgcagccagctgcggaagctgcagtggttcggcgagatcaaccgccgtggcttcgtcaagatcaccaagaagctcgacaagaagcttcccgacatggcgaaccaaacgacgacacagcatcgctacatctcaacaaaggttgacctccgcccgttcgccaagggtaccaccatcgccaggttgctctcagagatcaacaagtggatatcagtgcttggtgactcgcatcatgccgatgatgccaggtccgagagatcgactctctccctaggacgctcaacggcgaaagcgatgtcgagtgttcctccggaattgctcgaccaactagaccaggcaatccggaaagacgatgtggaggcccttagagaagggctgaccaccgggaatctattgagcacggagccagcctcacagagggtgctgcttaacattctccaacggtcaatctcagcacgttccaagggctcgattgccttcctcctcgagaacattacctctctggacgagccagacgatatcaatgagcggaactgcatccacagactggtcatccacatcggccggacaaagacagcctcagcaaagaatgaagacgacgctccaaagtcgtctgtgaattcctttcccggggcggttcagtacgcacagaactacctcactccagcgacatcgccttccccgacgccgagagtctgcggtctcaaggagtcaaaggatcttctgaccaaggatgacgaggcggtccagatgctgatttacctcttggaaagtctcaaaccaagccaaagagcggcgttgagctcgagggacaactttggccggatcccactgcactacgcggcacagtttgggtttgttgtggtctgtcaaatcctgatgaagaagatgcaggaatgggggcagttcaacgtcgagaacggcatcgacgccccagaatggcaagacaaggatggcaatgctccagtccatctcagcgtcctcggcggccaccgtctgacgaccaaggcgctgctccagggcgaggactggcagggcgtgagcgacaacaaggccgagatgaggcggatgatctccaagtcaagcgccgtccttgcgatcgccaccaaggccaacttcaaggccatagtagagatgctcgtgggggctggcgtggacatcaactggcaggacaagagcggcgagacagcgctgcatatcgccgctcggttcggccacgatgaatgcgccaaggtactgatcaagggaacggccgagcagaaagcgaacctggagctggctgagcattcgttcgcttggacgccgcttcatatcgccgccgtggatggccatctgtccgtcgcacagttgttagtggatgccggtgccgacgtggacaagacagattcgtcaggctggacagcgaaagagcacgctgcgctgaggggacatcttcccattgcccgtctccttgccgcgcacagccgaggcgaggatgactcgggtacgagcagctccgacgacgagaagggctccacagaacctgtggctcgcgaggtcgcctctcttgaggacaggagatctaacggtacccctcgcgcagccgaacccgtcaagtcgttcgggcatcgttatctccgagacgagagcctggtgcttgtcagtctcggctccatggatatgcgcaagaacgtggaggccgtcacgctggacaaagtgccgctcaacgaggcccacaacacgcagctcgatacggccctctctattgtcgtgtcggcgcagggcgcacagggggacccaactatcattgacatgccggtccacgagaacatctcaacggagccgatcgtcttcacaacgcccgatgccaccaaagtcaagctgttattcgacattgttccgacctactcgggcaacaaaaacaacaaggtcggccgcgccgtcgcgctgctgtctagcgtgcggccgacgattggacaaaagcggatgaatctacagggcgacgtctgcgttccgattgtgggtgccaatctcgacgtgatcggcacggtcaacttcaacttccttatcatcacgcccttctcgcacccgaatatggaagtgacggagcagcggacgtactggaagaagatgacgtcgaccatggtcatcggccaccgcggtctgggcaaaaacctcatgtccaaccggtccctccaactgggcgagaacacggtgccgtccttcatcgcggccgccaacctcggcgctcagtacgtcgagttcgacgtccaactcaccaaagaccacgtgcccgtcatttaccacgacttcctcgtcagcgagacgggctttgacgctcccgtccatactctgacgcttgagcaattcttgcacatcaacccggattcctctcgtcgccacgccaacggtggcagcggctccaacggcgattcccctaagctccagcacaagcagctgtccaagaccaagaggagcaacagccctggcccgcgccagcgttccatgtcgatggactggcccgcgcccggggcccagttcgccagcaagcaggatatggaagagcgcatgaagcacacgcgcgactttaaaaccaaggggttcaaggccaactcgcgcggcaactttatccaggcccccttcgccactctcgaggacctcttccgcaagctacccacgtcggtcggcttcaacattgagctgaagtatccgatgctgcacgagagtgaggagcacgagatggacacgtacgcggtcgagctgaactcgttctgcgacacggtgctagaaaaggtctacgaccatctcgacccgaaggcggccgccggcggcaatggcaggcacatcatattcagctcattcaacccggacatctgcctgtgcctgagcttcaagcagcccaacatcccaatcctgttcctgacggacgccgggacatgtcccgtaggtgacatccgtgcaagcagcctgcaggaggcgattcggttcgcatcgcggtggaacctgctcggcatcgtgagcaactcggagcctttcgtcaacagcccgcggttggtcagggtggtcaagcagaacggcctggtgtgcgtgagctatggggtcctcaacaacgaacccaagttggtgcagcgccaagtcaaggaaggcatcgacgccgttatcgtcgacagtgtcctggctatccgaaagggcctcacgggtggccaggaggctgcgaccacgacgagtgctgacaagttgcgggaaaaggtggagaaactggccgtcagtgatccagctgagaacggggtggccgccaacaatggggggcactga

SEQ ID NO: 702 - protein, 1201 aa, Myceliophthora thermophilia
MKFGRNLPRNQVPEWAGSYINYKGLKKLIKAAVRAAQNGEPVDLAEFFFDLDRNLEDVDSFYNKKYADACRRLKVLQDRYGTSPEVVANLDDDEIEELMGALLELRSQLRKLQWFGEINRRGFVKITKKLDKKLPDMANQTTTQHRYISTKVDLRPFAKGTTIARLLSEINKWISVLGDSHHADDARSERSTLSLGRSTAKAMSSVPPELLDQLDQAIRKDDVEALREGLTTGNLLSTEPASQRVLLNILQRSISARSKGSIAFLLENITSLDEPDDINERNCIHRLVIHIGRTKTASAKNEDDAPKSSVNSFPGAVQYAQNYLTPATSPSPTPRVCGLKESKDLLTKDDEAVQMLIYLLESLKPSQRAALSSRDNFGRIPLHYAAQFGFVVVCQILMKKMQEWGQFNVENGIDAPEWQDKDGNAPVHLSVLGGHRLTTKALLQGEDWQGVSDNKAEMRRMISKSSAVLAIATKANFKAIVEMLVGAGVDINWQDKSGETALHIAARFGHDECAKVLIKGTAEQKANLELAEHSFAWTPLHIAAVDGHLSVAQLLVDAGADVDKTDSSGWTAKEHAALRGHLPIARLLAAHSRGEDDSGTSSSDDEKGSTEPVAREVASLEDRRSNGTPRAAEPVKSFGHRYLRDESLVLVSLGSMDMRKNVEAVTLDKVPLNEAHNTQLDTALSIVVSAQGAQGDPTIIDMPVHENISTEPIVFTTPDATKVKLLFDIVPTYSGNKNNKVGRAVALLSSVRPTIGQKRMNLQGDVCVPIVGANLDVIGTVNFNFLIITPFSHPNMEVTEQRTYWKKMTSTMVIGHRGLGKNLMSNRSLQLGENTVPSFIAAANLGAQYVEFDVQLTKDHVPVIYHDFLVSETGFDAPVHTLTLEQFLHINPDSSRRHANGGSGSNGDSPKLQHKQLSKTKRSNSPGPRQRSMSMDWPAPGAQFASKQDMEERMKHTRDFKTKGFKANSRGNFIQAPFATLEDLFRKLPTSVGFNIELKYPMLHESEEHEMDTYAVELNSFCDTVLEKVYDHLDPKAAAGGNGRHIIFSSFNPDICLCLSFKQPNIPILFLTDAGTCPVGDIRASSLQEAIRFASRWNLLGIVSNSEPFVNSPRLVRVVKQNGLVCVSYGVLNNEPKLVQRQVKEGIDAVIVDSVLAIRKGLTGGQEAATTTSADKLREKVEKLAVSDPAENGVAANNGGH

SEQ ID NO: 703 - DNA, 2157 bp, Myceliophthora thermophilia
  CDS (1)...(2157)
atgtgcggcgtgccccagataaagcgccgggttacccgcaggagaatgttgacctggtcgtggttctccgcagtcgccgtactgctgctgctctcgctctacctctacggcttcggatacgggtcaggccggcagcgggtgtctggtccgccgctggatgtgggcaaggacgacgccgagaagcccgcagcaacaacagcaacaacagcaacagcaacaacaacgacaaccaaaactactgcgacagacaccgtcaccactaccaccactgctgctcccaccgccggtcccatgcccacaacacacaaacccggcggcactgccgcagcccgccccgccgtcgttcttcggcagggcacctacatcggcaccacgctgctggcctcgcaccgcttccccagggctctcgacgcctttcgcggcgtgccatacgcccaggacacgagcggcccgaaccggttccgtccgccccagccgctgccagagtccacagaggtctttgatgcggtaaggtggggcaagatatgccccaacgacggagtggtgctgcgcaacatgagcgagaactgtctgaacgccaacatctaccggcccgccggcttggtcgaccgggatgggtacgagaagacggccgacggcaccaggaggcggccgcgcctgcccgtcgtcgtgtacatccacggcggcggcttcaacaagggcaacgggaccgagcgcaacatggccagcttcgccgcctggtccaaggaacccatagtgtccgtcagcttcaactaccgcgtcggcgcgctgggcttcctgccgtccgacgtgaccgcccgggaagggctgctgaacctgggcctgcgcgaccagcagatgctgctggactgggttcaggaaaacatcgaggccttcggcggcgaccccaagaacgtgagcgttatgggcctcagcgcgggggcgcactcgatcggccaccacattatgtactactccagcaggtccaccccgccccccttcatcaaggccatcctcgagtccggtgcgaccacggcccgtgccgtgttctacccgacccaccctcgccacctcgtccagttccgcgagttcctcatcgccgccggcgtcgccggcattcccgagtcggagctgttcgaccacctccgcaagctgcctctcgagaccatcgtgcgcgcctccaaggtcgtctgggacaagtacgtcgacagcgtgacctggcccttccagcccgtcatcgacagccccaaccacctggcccagtcgagccacgccgagctcgacgccccccgcccgccgctgatccccgacctccccatcaagtcgtggctcgccggcaaccacctccgcatccccgtcataaccggcttcagcaccaacgaggggaccatgttcatcccccacaacgccgacacggcggccgacttccgctccttcttccagaccctcatccccaccctcaccccgggcgacctcgacgagctcgaggccctctacccggaccccgtcagggtgcccacgagcccctaccgccgcggcatcccgcccggcgcgggcaggcagtgggcgcgcctcgacgccgcctactcgcactacgcctacatctgccccgtcctgcagacggcccactacatgtccctgtcgggcgtcggccccgtctacgtctaccgctacgccgccacctcgtccaacggcacggccaaccacggcgacgaggcccccgccgtcgcccacgacgtcatggagctccgcggccgcgtcggcatgcgcgccatcgcccgcgccatgcacggccgctgggcgcgcttcgtggccagcgacgcgtccagtccggacatcatcagtgcccaccaacacccccataagaaggagaggagcggcagcgtcaacgacgcggacgactacgacgaggtcgagtggccgcctttcgtctcgccgttcgggcccgacggcgaccgcgagggcacgggcaagatcatggtgttcggggaaggcaacgacgagatgggcggggggtggcaccggggggtgccggccaaggtggtcgagatgacggagctcgagaaggaggcgtgccggttctggtggccgagggtctggctgagcgaggggatgggttggaaagatgggaagcgctcggccgaggtgaggctatga

SEQ ID NO: 704 - protein, 718 aa, Myceliophthora thermophilia
MCGVPQIKRRVTRRRMLTWSWFSAVAVLLLLSLYLYGFGYGSGRQRVSGPPLDVGKDDAEKPAATTATTATATTTTTKTTATDTVTTTTTAAPTAGPMPTTHKPGGTAAARPAVVLRQGTYIGTTLLASHRFPRALDAFRGVPYAQDTSGPNRFRPPQPLPESTEVFDAVRWGKICPNDGVVLRNMSENCLNANIYRPAGLVDRDGYEKTADGTRRRPRLPVVVYIHGGGFNKGNGTERNMASFAAWSKEPIVSVSFNYRVGALGFLPSDVTAREGLLNLGLRDQQMLLDWVQENIEAFGGDPKNVSVMGLSAGAHSIGHHIMYYSSRSTPPPFIKAILESGATTARAVFYPTHPRHLVQFREFLIAAGVAGIPESELFDHLRKLPLETIVRASKVVWDKYVDSVTWPFQPVIDSPNHLAQSSHAELDAPRPPLIPDLPIKSWLAGNHLRIPVITGFSTNEGTMFIPHNADTAADFRSFFQTLIPTLTPGDLDELEALYPDPVRVPTSPYRRGIPPGAGRQWARLDAAYSHYAYICPVLQTAHYMSLSGVGPVYVYRYAATSSNGTANHGDEAPAVAHDVMELRGRVGMRAIARAMHGRWARFVASDASSPDIISAHQHPHKKERSGSVNDADDYDEVEWPPFVSPFGPDGDREGTGKIMVFGEGNDEMGGGWHRGVPAKVVEMTELEKEACRFWWPRVWLSEGMGWKDGKRSAEVRL

SEQ ID NO: 705 - DNA, 1161 bp, Myceliophthora thermophilia
  CDS (1)...(1161)
atgaagcgattcttcgtcaaccttttggcatggctttgggttggagttgcgctctcggctcccgtccgccgggggaaagcgtttgaccgcttcattaccatctggctcgagaatcaggactttgccaaggtcgtcgtcgacaaccgcattgtcgatctaaagaggcacggcatcctcctgaccaggtacttcgcccatacacaccctagccagcccaactaccttgccgccatcgcgggcgactacttcggcctcaaccatgacgactgggtgcgcctgcccgaagatgttgccactatcgtcgacctgctcgaagaaaaaggcgtgacatgggccggttactttgaggacatacccagcccgggctacatgggcaacgccagcgacgggtcaaccggcaccgacggatgggactatgtcaggaagcacaatccctttgtgtcgttcgacagtatcaccaacgacggcgagcggctgctgaagatcgactcgttcgatgccttccagcgggccttcgctgccaagaaggtgcccgagtacgtcttcatgagccccaacatgatgaacgacggccacaacacgacgctcgactacgccaccaagtggtcgcacaagttcctgcagccgctgctggccgctaaggcatttgacgagcgcactctgatcgctcttacctacgacgagtccgagacgtacgaggaacccaaccacatcgtcaccctgctcctgggcaacgccatcccgccggccctcaagggcaccgaagacgacaccttctacacccattacagcatgctctccacccttgagctgaactggcgcttgcacaccctgggccggtatgacgtcggggcgaatgtcttcaagttcgtcgcggatcagctcaggtacaccgcaaacaaggaaccggagaatgccgccaccgtcgacaactcggtctcgtaccccggcctgctgaacaacgatacttccgcacgactgccccttccgttcccgaacacgaaactcgtcggcgccagcgggctcgggatcttgccatcgatcgagaaagcattgtcgaggacaaagatcaccaagacgccctatgatggcagcgggaaggtatttgacggggacaagaacccgcccgtctacaagcctcccgcaggtaatccgtcatga

SEQ ID NO: 706 - protein, 386 aa, Myceliophthora thermophilia
MKRFFVNLLAWLWVGVALSAPVRRGKAFDRFITIWLENQDFAKVVVDNRIVDLKRHGILLTRYFAHTHPSQPNYLAAIAGDYFGLNHDDWVRLPEDVATIVDLLEEKGVTWAGYFEDIPSPGYMGNASDGSTGTDGWDYVRKHNPFVSFDSITNDGERLLKIDSFDAFQRAFAAKKVPEYVFMSPNMMNDGHNTTLDYATKWSHKFLQPLLAAKAFDERTLIALTYDESETYEEPNHIVTLLLGNAIPPALKGTEDDTFYTHYSMLSTLELNWRLHTLGRYDVGANVFKFVADQLRYTANKEPENAATVDNSVSYPGLLNNDTSARLPLPFPNTKLVGASGLGILPSIEKALSRTKITKTPYDGSGKVFDGDKNPPVYKPPAGNPS

SEQ ID NO: 707 - DNA, 336 bp, Myceliophthora thermophilia
  CDS (1)...(336)
cagccccgccttcgaaaggctgacatcgcctccgctcctgaacatctagacggcggctgcaccgcaagcctcttcgacttttgcacctcgaccgtcctggccgccgttgcccgcccaggctactggtcctacctgggcgtgagccggtccctgaacaccacctacctccgcccggccccggtcggcagcgaggtgctgatcgagtgcgagatcgtccagatcggccagcgcctgtgcagcctgcgcgggaccatgcggcgcgccgacgacggcgccctggtggcgacctgcgagcacggcaaggtcaacaccgatcccgaggtgcccaaggtctga

SEQ ID NO: 708 - protein, 111 aa, Myceliophthora thermophilia
QPRLRKADIASAPEHLDGGCTASLFDFCTSTVLAAVARPGYWSYLGVSRSLNTTYLRPAPVGSEVLIECEIVQIGQRLCSLRGTMRRADDGALVATCEHGKVNTDPEVPKV

SEQ ID NO: 709 - DNA, 1143 bp, Myceliophthora thermophilia
  CDS (1)...(1143)
atgacgctcaagcagttgctcatgagcgcgctgctcgcagcacccgcgctggctcatccggcccacaaggagaaggtgtacgcgcacgcggccctccccctcgagcgcaagtctctggcccactgtgcggccaagttcaacgaacccgagttcgtcaagaggacggtcgaacaccatggccgcgagttgcatcggctgaagcgtgcgcgaggtattccggttgaggaaaagcccaagataagcccgcgcgactacctcgatgtcatcaagatcgaccacaagagcaacaagacggtcaccgaggggatggatctcagcacgctgtttgaggactacggggcctgcatgctgatgcctgctgtcgaccagggccctctgtacgtcaaaggagaggaggtccgaaaggacattacgaatggcgagccgggcatccccttgaccctggcgatccaggtcgtggactacaagacgtgcgagacggtcacggatgcgtttgtcgacgtctggagctccaattcgactggcatctacacgggcgtccagggctacccgggcatgggcgaccccaacgactcctcgatcctgcagggtaccaccctccgcggcgtgcagccgaccgacgaccacggcattgcctcttttgactcgctgttcccgggccactacgaggggcgtgctacccacattcacgccatcgtctaccttggcgcgaccaaggaggccaacaacacgatcacgggcggccgggcggcgcacgtgggccaactatactttgaccagagtctcatcaccgaggcggacaagctggcgccgtacaacaccaacaggatggcgattgtgttgaaccagaacgacttcctcttccgggcgggcgccaacggcgacgacccgatcgtgcgctacgccctcgtcggcaacaagcttgaggacggcctgttcgcctggatccgctttggcatcgaccagaacgccaacctgcgcgttaacccggccgccttctggacggaaaatggcggcgtcatgaaccccaccggccccatctcgcagcttcctcccggcggcttccccggctggcctggttggggcatgaggaagagggtagaggcggccttggctgccgctcaggcgcagaacgacgggtaa

SEQ ID NO: 710 - protein, 380 aa, Myceliophthora thermophilia
MTLKQLLMSALLAAPALAHPAHKEKVYAHAALPLERKSLAHCAAKFNEPEFVKRTVEHHGRELHRLKRARGIPVEEKPKISPRDYLDVIKIDHKSNKTVTEGMDLSTLFEDYGACMLMPAVDQGPLYVKGEEVRKDITNGEPGIPLTLAIQVVDYKTCETVTDAFVDVWSSNSTGIYTGVQGYPGMGDPNDSSILQGTTLRGVQPTDDHGIASFDSLFPGHYEGRATHIHAIVYLGATKEANNTITGGRAAHVGQLYFDQSLITEADKLAPYNTNRMAIVLNQNDFLFRAGANGDDPIVRYALVGNKLEDGLFAWIRFGIDQNANLRVNPAAFWTENGGVMNPTGPISQLPPGGFPGWPGWGMRKRVEAALAAAQAQNDG

SEQ ID NO: 711 - DNA, 1749 bp, Myceliophthora thermophilia
  CDS (1)...(1749)
atggcccccttcaagatggtcgccgcggcggcggcgctggctctcgtcggtcacgtccaggctaccgagattcccctccctccgtgcctcgaccccttccagccatttgtctattccggttgctttggggaatcggccggcacccagctcttgcccttccgccctccccttgaccagcaggagggcaccgtcgagaagtgcgtggccacgtgcaagggcaatggctaccgctacgccggcctcgtctactacggcgtgtgctactgcggccagaccgtcaacggaccgcaggtcgacgactcgcagtgcgacctcccctgcaatggcaacaagtccgagacgtgcggcggtaacggccacttttctgtctactctgaccccaccttcctgcctgtcgaccatgtcaccgttgccgactacgaacctctcggctgctggaccgacgactcgagcctgggccgcgccctgacataccgtcaggtccagctcgacagcgccaccctgaccaccgagaagtgtctgcaggcctgccgcgacggcggcttcccctttgccggaaccgagtacagcggtgaatgctactgcggcgtcgtcatcggcaacgacacctatgctgcgcccgctgacgagtgcgacatgccctgcaacggcaacgcggacgagacctgcggtggccgcagccgcctgaacctctacgtcgccgaggagctgggatcgctccaaccctgtggttaccagccctccgtctcgagcagcacctcgctgccgccgtcttcgaccgtcacttccaccacctcctcttccacctcttcgtcgacagcgcctcccgaaacttcaactattacttcgacgagcaccaccccggccacctcgaccacaagcaccagcagctccgcctgcgtgtctaccaccgtcgtgcccccgcagtgcgagtacaagtgcggcaagtggtgctcgtcgcccctccccgactggaacgaccccaagacgtgcaagaatgcctggtctagctgccacgtccaagttgcgtcctgcttcaagcaggccgggtggcccgacgtgctcgactgcttcgagtttagccagtggtgcgccgacatcgccaagtactgcgacagcaacccgcgtggcggctgccgcaaggacgacttctggggcaagaagccccccaagggcggtgcgcacccatccactaccatcactgtgaccgccacgtgcgcccctgccaccggcacggagccgcccgcgacttctaccaagccccctgcctccagcaccaccaccaggtgccccatcccgacccccaccaacatctgcatccagcccagtagcccgctctacggctacggcccgggcaagccggtcggcggcatcgacatgcccgtcgtgagctgcaacgacctccccaacgagtgggcccagttcccgttcaagggctacaccgaccgcgatagccgcaactgccgcaagtatcagcggaaccagtgcacaaacgtctgcgccgacgcctgcaaggagcagtacgaggactgcgtcaacgtctacgccgagggctgcaagcgcaagccgcacgggcgccgggacgtcggctactttgagttccggggcagcgtcgagaagcgcaccttcgggtggaacgacgacttctcgggcgccgtcaacaagtgcaaggcccagtacagcgactgcttgagggtaaacaggggcgtcacgggtgccggcaagtgcaccaagccttgcggatggtag

SEQ ID NO: 712 - protein, 582 aa, Myceliophthora thermophilia
MAPFKMVAAAAALALVGHVQATEIPLPPCLDPFQPFVYSGCFGESAGTQLLPFRPPLDQQEGTVEKCVATCKGNGYRYAGLVYYGVCYCGQTVNGPQVDDSQCDLPCNGNKSETCGGNGHFSVYSDPTFLPVDHVTVADYEPLGCWTDDSSLGRALTYRQVQLDSATLTTEKCLQACRDGGFPFAGTEYSGECYCGVVIGNDTYAAPADECDMPCNGNADETCGGRSRLNLYVAEELGSLQPCGYQPSVSSSTSLPPSSTVTSTTSSSTSSSTAPPETSTITSTSTTPATSTTSTSSSACVSTTVVPPQCEYKCGKWCSSPLPDWNDPKTCKNAWSSCHVQVASCFKQAGWPDVLDCFEFSQWCADIAKYCDSNPRGGCRKDDFWGKKPPKGGAHPSTTITVTATCAPATGTEPPATSTKPPASSTTTRCPIPTPTNICIQPSSPLYGYGPGKPVGGIDMPVVSCNDLPNEWAQFPFKGYTDRDSRNCRKYQRNQCTNVCADACKEQYEDCVNVYAEGCKRKPHGRRDVGYFEFRGSVEKRTFGWNDDFSGAVNKCKAQYSDCLRVNRGVTGAGKCTKPCGW

SEQ ID NO: 713 - DNA, 2721 bp, Myceliophthora thermophilia
  CDS (1)...(2721)
atggaactccgatctgtcgtccgtctcttggtcctgtcggcctccgtcttcgcgccgggggtcctcagtgcgttcgggtacacctcgtccggcaacaactatgtcatcgatgccggctccgccaacccgctggtcttctcggtgagcaagtcgagctgcgacatcaactcgatcaagtatcgcggcaccgagctccagtattccaacaccggaacccacatcggttccgggctcgggtcggccaccgtctcggtcagccagatcagcggatcgtcccggtacatcaaggtgacatgtgtgacgtcgaccctgacgcactacattgtggtccgggagggtgagagcatcatctacatggccacctacatcaccgccgagccgtcggttggcgagctgcgcttcatcgcccgtctgctgcccgacaaactgcccaacgagtacccgtacggcgaggtctccaacacgagcggcgccagcgcgacagtcgaggggtccgatgtcttcatcgtcaacgggcagacgaggtccaagttttactcgtcgacacgcttcatcgacgaggactcgcactgcgtgtacggcggcagcgacctgatccacgtctgcatcatgacgccccagcaggagtcgtcgtccggcggcccgttcttccgcgacatcgactcgaacaacgcgggggattcgaccaacctgtacaactacatgaacagcggccacgtgcagaccgaggcgttccgcatggggcttcacggaccgtacgccatgcagttctcgcgctccggtatccccagcgtgaagaacctggacgtctcgtggttcggcgaggtctcggtcaccgggtacgtgcccgcctccggccgcgggaccgtgcaggggaccgcgagcggcgtgcagagcgggatgcagggggtggtgcactggtacaacagcaatgcgcagtactgggccaagacgtcatccagcggcgccttcacctcgccgctgatgaagcccggcacgtacaccatggtactttaccagaccgagttcaagattgccacgaccaccgtcaccgtgtccgcgggccagacgaccaggcaggacattgccggcaacttcaacacgtcccgcaacacgctcttccagatcggcgagtacgacggccagccgaccgggttccgcaacgccgacaagttcctccgcatgcacccgagcgacagccgcatggacagctggggccccctgacctacacggtgggcagctcgacgctgtccgacttccccatggccgtcttcaagtcggtgaacaacccggtgaccatcaagttcaacctggccagcgccccgggggccgccaccctgcgcatcgccacgaccctcagcttcgcggggagccgcccccaggcgacggtcaacggctggtccggccccgtcccggccgccccgaccaagatcgacagccgcggcgtgacgcgcggcgcctatcgcgggtacggcgagatctataccgtcaacatccccgccggcacgctcgtcgctggcatcaacaccatcacaatcagttccgtctctggcagcgatggagatgccttcctgagccccaactttacacatagcgacattccgccagaagtcatggttgccccatctgttctcgccctgctggccagcctggcttggtcagcagttgccgcggccaccacggagtcgttgagagcaacaaaggccgggttgcgcctcatcaagacatccccggaagacggcggacagtggataaccgaagagcagaagattcgagactacaaatcaaagggcatcggctttgtcgacataactgacatcaccgaccccgaagtgctcgccgcactgtcagcacccgactcccgcaatggaaacaacaccgtctcggcacaggctgtctcgtacccgtccagcgtcagccaccaagccgaggccaatccactggtggcagcagtctcgactacgaatcctaagacttggctgaagaccttgaccgaaagctcgtacgggacccaggccggcacctggctgttcgacaccatcaggagcgtcgccgcggccaatccatccattaccgtgactcagttcacccactccttcaaccagccatccctcattgctaaaattccgggcactacgtcaaacctagtcattgtctcggcgcactatgactctaccggcgggtcctcgacagcgcgtggaccaggcgctgacgacaacgggtccggtgtcgtggtcctcctcgaggcacttcgggtgttggccgaggatggattcaagcccaagaacactctcgagttccatttttacgccggcgaggaaggcggcctgctcggctcacaggccgtcttctccaactacaagtcggccggcaagagcgtgctcgccgtcgtcaaccaggacatggcaggctattcgcccagcgggaaactgtccatctacactgactatgttgactcggccctgaccgcatatacccggatcgtggctaccgcatacgtcggctcgactacgagcgacacctgcggatacggatgctcggatcatgcgtcagcgaggtccaacgggttcccggcggcctatgtgtgtgacgagcggatggacacctcgtcaccctacattcatactcccaacgacgcttactcgactatcatgtgggacgctgtcctccgacacgccaagttcacggtcgcgttcttggtggaggcttcctacctctga

SEQ ID NO: 714 - protein, 906 aa, Myceliophthora thermophilia
MELRSVVRLLVLSASVFAPGVLSAFGYTSSGNNYVIDAGSANPLVFSVSKSSCDINSIKYRGTELQYSNTGTHIGSGLGSATVSVSQISGSSRYIKVTCVTSTLTHYIVVREGESIIYMATYITAEPSVGELRFIARLLPDKLPNEYPYGEVSNTSGASATVEGSDVFIVNGQTRSKFYSSTRFIDEDSHCVYGGSDLIHVCIMTPQQESSSGGPFFRDIDSNNAGDSTNLYNYMNSGHVQTEAFRMGLHGPYAMQFSRSGIPSVKNLDVSWFGEVSVTGYVPASGRGTVQGTASGVQSGMQGVVHWYNSNAQYWAKTSSSGAFTSPLMKPGTYTMVLYQTEFKIATTTVTVSAGQTTRQDIAGNFNTSRNTLFQIGEYDGQPTGFRNADKFLRMHPSDSRMDSWGPLTYTVGSSTLSDFPMAVFKSVNNPVTIKFNLASAPGAATLRIATTLSFAGSRPQATVNGWSGPVPAAPTKIDSRGVTRGAYRGYGEIYTVNIPAGTLVAGINTITISSVSGSDGDAFLSPNFTHSDIPPEVMVAPSVLALLASLAWSAVAAATTESLRATKAGLRLIKTSPEDGGQWITEEQKIRDYKSKGIGFVDITDITDPEVLAALSAPDSRNGNNTVSAQAVSYPSSVSHQAEANPLVAAVSTTNPKTWLKTLTESSYGTQAGTWLFDTIRSVAAANPSITVTQFTHSFNQPSLIAKIPGTTSNLVIVSAHYDSTGGSSTARGPGADDNGSGVVVLLEALRVLAEDGFKPKNTLEFHFYAGEEGGLLGSQAVFSNYKSAGKSVLAVVNQDMAGYSPSGKLSIYTDYVDSALTAYTRIVATAYVGSTTSDTCGYGCSDHASARSNGFPAAYVCDERMDTSSPYIHTPNDAYSTIMWDAVLRHAKFTVAFLVEASYL

SEQ ID NO: 715 - DNA, 1011 bp, Myceliophthora thermophilia
  CDS (1)...(1011)
atgcttttcaccaaggctgtttccggcctcgccatcctcgcgggcctcgttgccgctcacccggggcacgatgctagcaaggaggctgccgagcgccgggcctacctgcagaacgccaagcgcacctccctcgcccactgcgccgacaagctgagggcccgcggcaccgagtctcgcaacatcgtccggcgcaaggccgtcgtcgagaaggcccgccagaagcgcggccttaccaagcgcgactttagcgacgtcctgggcaccgaccacaacaagaccaccctgggctacacccccaacaccgacgccgccaccctgtttgccggctacaactcgtgcctcctgacgcccgaggtcacccagggaccgtactacgtcgccggcgagtacgtccgcgagaacgtggttgaggaccagcccggcttgcccctcctcctcgagtaccaggtcgtcgacgtggcgacgtgcgagccggtgccggaggtgtacgtcgagatctggcactgcaacgccacgggcgtgtacggcggcgtggtggcgagcggcaacggcgactcgtcggacgcgagcaacctcgacaacacgttcctgcgcggtatccagccgaccgacgccgagggcgtggcccagttcgagtccgtcttcccgggccactacaccggccgggcgacgcacatccacatcatggtgcacaccaacgcgaccctgcaggccaaccagacgctcggcctcgacaactacgccagccacgtcggccaggccttcttcgaccaggcgctgatcacggccgtggagaagctggagccgtacgcgtccaaccagcagccgctgaccaccaacgaggaggacagcatcatggccgaggagtccgccaccgacggcgtcgaccccgtcatggagtacactctgctcggcgacaacctctccgacggtctgttcgcctggatcgcctttcgggcatcggacacgatccgctccgaggtctatcagtcccgggccgtcctaccttga

SEQ ID NO: 716 - protein, 336 aa, Myceliophthora thermophilia
MLFTKAVSGLAILAGLVAAHPGHDASKEAAERRAYLQNAKRTSLAHCADKLRARGTESRNIVRRKAVVEKARQKRGLTKRDFSDVLGTDHNKTTLGYTPNTDAATLFAGYNSCLLTPEVTQGPYYVAGEYVRENVVEDQPGLPLLLEYQVVDVATCEPVPEVYVEIWHCNATGVYGGVVASGNGDSSDASNLDNTFLRGIQPTDAEGVAQFESVFPGHYTGRATHIHIMVHTNATLQANQTLGLDNYASHVGQAFFDQALITAVEKLEPYASNQQPLTTNEEDSIMAEESATDGVDPVMEYTLLGDNLSDGLFAWIAFRASDTIRSEVYQSRAVLP

SEQ ID NO: 717 - DNA, 678 bp, Myceliophthora thermophilia
  CDS (1)...(678)
atgcgcttctcgctctacatggcgctcatttccacgctcgcggcggtagccgagtgcagcagcttccagcagcagtgctccaagctcgccagcaagctcaagatcgagaatgctaccgcctggttctccgagtacgtggccgctggcaccaacatgtccttcccagacacggacccgtcgtgcgcccagggcagcctggtggtcgatgtcgacttctgccgcgtcgccccgtacgttgccacgtcccaccgttcgggcatcagcatggaggcctggctgcccaagaactggaccggccggttcctgagcacgggcaacggcggtctcaatggctgtctctcgtacgacgacatggcctacacggtcgagcttggcttctccaccgtcggcgccaaaaactgccacaacggccacaacggcacctcgggcgcccccttcctcaataaccccgacgtattagtcgtggactttgcctggccgtccgttcacaccaacgctgtggcggctacgtcgacggcatcatcgaggacccggaactctgccggtaccgccttcgtcggcggccgcgccggcggcgaggtcgccttccgccgcaggcattgcaagtacccgctgcggaacacgtacgggggcaagggagaccccaaggatcccgacagctggcagtgcgttctgtga

SEQ ID NO: 718 - protein, 225 aa, Myceliophthora thermophilia
MRFSLYMALISTLAAVAECSSFQQQCSKLASKLKIENATAWFSEYVAAGTNMSFPDTDPSCAQGSLVVDVDFCRVAPYVATSHRSGISMEAWLPKNWTGRFLSTGNGGLNGCLSYDDMAYTVELGFSTVGAKNCHNGHNGTSGAPFLNNPDVLVVDFAWPSVHTNAVAATSTASSRTRNSAGTAFVGGRAGGEVAFRRRHCKYPLRNTYGGKGDPKDPDSWQCVL

SEQ ID NO: 719 - DNA, 201 bp, Myceliophthora thermophilia
  CDS (1)...(201)
atgaacaaggccccagccacttggcggggggatgggaaaccagcagacaactttggagatcatcatagcggcctcgcatgggatgatccgatgaagcgggtcgaaaaacagcggaggcaggctgttgtcgagtcgccctctgtactggatatcgtgcttctcgacacatccgccatgtccggctaccggaagcaagagtga

SEQ ID NO: 720 - protein, 66 aa, Myceliophthora thermophilia
MNKAPATWRGDGKPADNFGDHHSGLAWDDPMKRVEKQRRQAVVESPSVLDIVLLDTSAMSGYRKQE

1. A recombinant Myceliophthera thermophilus lignocellulose degradation enzyme of Table 1 or Table 2, wherein the enzyme is selected from the group consisting of a glycohydrolase, an esterase, an oxidase, and an oxidoreductase; or wherein the enzyme comprises an amino acid sequence selected from the group consisting of SEQ ID NO: 180, SEQ ID NO: 182, SEQ ID NO: 184, SEQ ID NO: 186, SEQ ID NO: 188, SEQ ID NO: 190, SEQ ID NO: 192, SEQ ID NO: 194, SEQ ID NO: 196, SEQ ID NO: 198, SEQ ID NO: 200, SEQ ID NO: 202, SEQ ID NO: 204, SEQ ID NO: 206, SEQ ID NO: 208, SEQ ID NO: 210, SEQ ID NO: 212, SEQ ID NO: 214, SEQ ID NO: 216, SEQ ID NO: 218, SEQ ID NO: 220, SEQ ID NO: 222, SEQ ID NO: 224, SEQ ID NO: 226, SEQ ID NO: 228, SEQ ID NO: 230, SEQ ID NO: 232, SEQ ID NO: 234, SEQ ID NO: 236, SEQ ID NO: 238, SEQ ID NO: 240, SEQ ID NO: 242, SEQ ID NO: 244, SEQ ID NO: 246, SEQ ID NO: 248, SEQ ID NO: 250, SEQ ID NO: 252, SEQ ID NO: 254, SEQ ID NO: 256, SEQ ID NO: 258, SEQ ID NO: 260, SEQ ID NO: 262, SEQ ID NO: 264, SEQ ID NO: 266, SEQ ID NO: 268, SEQ ID NO: 270, SEQ ID NO: 272, SEQ ID NO: 274, SEQ ID NO: 276, SEQ ID NO: 278, SEQ ID NO: 280, SEQ ID NO: 282, SEQ ID NO: 284, SEQ ID NO: 286, SEQ ID NO: 288, SEQ ID NO: 290, SEQ ID NO: 292, SEQ ID NO: 294, SEQ ID NO: 296, SEQ ID NO: 298, SEQ ID NO: 300, SEQ ID NO: 302, SEQ ID NO: 304, SEQ ID NO: 306, SEQ ID NO: 308, SEQ ID NO: 310, SEQ ID NO: 312, SEQ ID NO: 314, SEQ ID NO: 316, SEQ ID NO: 318, SEQ ID NO: 320, SEQ ID NO: 322, SEQ ID NO: 324, SEQ ID NO: 326, SEQ ID NO: 328, SEQ ID NO: 330, SEQ ID NO: 332, SEQ ID NO: 334, SEQ ID NO: 336, SEQ ID NO: 338, SEQ ID NO: 340, SEQ ID NO: 342, SEQ ID NO: 344, SEQ ID NO: 346, SEQ ID NO: 348, SEQ ID NO: 350, SEQ ID NO: 352, SEQ ID NO: 354, SEQ ID NO: 356, SEQ ID NO: 358, SEQ ID NO: 360, SEQ ID NO: 362, SEQ ID NO: 364, SEQ ID NO: 366, SEQ ID NO: 368, SEQ ID NO: 370, SEQ ID NO: 372, SEQ ID NO: 374, SEQ ID NO: 376, SEQ ID NO: 378, SEQ ID NO: 380, SEQ ID NO: 382, SEQ ID NO: 384, SEQ ID NO: 386, SEQ ID NO: 388, SEQ ID NO: 390, SEQ ID NO: 392, SEQ ID NO: 394, SEQ ID NO: 396, SEQ ID NO: 398, SEQ ID NO: 400, SEQ ID NO: 402, SEQ ID NO: 404, SEQ ID NO: 406, SEQ ID NO: 408, SEQ ID NO: 410, SEQ ID NO: 412, SEQ ID NO: 414, SEQ ID NO: 416, SEQ ID NO: 418, SEQ ID NO: 420, SEQ ID NO: 422, SEQ ID NO: 424, SEQ ID NO: 426, SEQ ID NO: 428, SEQ ID NO: 430, SEQ ID NO: 432, SEQ ID NO: 434, SEQ ID NO: 436, SEQ ID NO: 438, SEQ ID NO: 440, SEQ ID NO: 442, SEQ ID NO: 444, SEQ ID NO: 446, SEQ ID NO: 448, SEQ ID NO: 450, SEQ ID NO: 452, SEQ ID NO: 454, SEQ ID NO: 456, SEQ ID NO: 458, SEQ ID NO: 460, SEQ ID NO: 462, SEQ ID NO: 464, SEQ ID NO: 466, SEQ ID NO: 468, SEQ ID NO: 470, SEQ ID NO: 472, SEQ ID NO: 474, SEQ ID NO: 476, SEQ ID NO: 478, SEQ ID NO: 480, SEQ ID NO: 482, SEQ ID NO: 484, SEQ ID NO: 486, SEQ ID NO: 488, SEQ ID NO: 490, SEQ ID NO: 492, SEQ ID NO: 494, SEQ ID NO: 496, SEQ ID NO: 498, SEQ ID NO: 500, SEQ ID NO: 502, SEQ ID NO: 504, SEQ ID NO: 506, SEQ ID NO: 508, SEQ ID NO: 510, SEQ ID NO: 512, SEQ ID NO: 514, SEQ ID NO: 516, SEQ ID NO: 518, SEQ ID NO: 520, SEQ ID NO: 522, SEQ ID NO: 524, SEQ ID NO: 526, SEQ ID NO: 528, SEQ ID NO: 530, SEQ ID NO: 532, SEQ ID NO: 534, SEQ ID NO: 536, SEQ ID NO: 538, SEQ ID NO: 540, SEQ ID NO: 542, SEQ ID NO: 544, SEQ ID NO: 546, SEQ ID NO: 548, SEQ ID NO: 550, SEQ ID NO: 552, SEQ ID NO: 554, SEQ ID NO: 556, SEQ ID NO: 558, SEQ ID NO: 560, SEQ ID NO: 562, SEQ ID NO: 564, SEQ ID NO: 566, SEQ ID NO: 568, SEQ ID NO: 570, SEQ ID NO: 572, SEQ ID NO: 574, SEQ ID NO: 576, SEQ ID NO: 578, SEQ ID NO: 580, SEQ ID NO: 582, SEQ ID NO: 584, SEQ ID NO: 586, SEQ ID NO: 588, SEQ ID NO: 590, SEQ ID NO: 592, SEQ ID NO: 594, SEQ ID NO: 596, SEQ ID NO: 598, SEQ ID NO: 600, SEQ ID NO: 602, SEQ ID NO: 604, SEQ ID NO: 606, SEQ ID NO: 608, SEQ ID NO: 610, SEQ ID NO: 612, SEQ ID NO: 614, SEQ ID NO: 616, SEQ ID NO: 618, SEQ ID NO: 620, SEQ ID NO: 622, SEQ ID NO: 624, SEQ ID NO: 626, SEQ ID NO: 628, SEQ ID NO: 630, SEQ ID NO: 632, SEQ ID NO: 634, SEQ ID NO: 636, SEQ ID NO: 638, SEQ ID NO: 640, SEQ ID NO: 642, SEQ ID NO: 644, SEQ ID NO: 646, SEQ ID NO: 648, SEQ ID NO: 650, SEQ ID NO: 652, SEQ ID NO: 654, SEQ ID NO: 656, SEQ ID NO: 658, SEQ ID NO: 660, SEQ ID NO: 662, SEQ ID NO: 664, SEQ ID NO: 666, SEQ ID NO: 668, SEQ ID NO: 670, SEQ ID NO: 672, SEQ ID NO: 674, SEQ ID NO: 676, SEQ ID NO: 678, SEQ ID NO: 680, SEQ ID NO: 682, SEQ ID NO: 684, SEQ ID NO: 686, SEQ ID NO: 688, SEQ ID NO: 690, SEQ ID NO: 692, SEQ ID NO: 694, SEQ ID NO: 696, SEQ ID NO: 698, SEQ ID NO: 700, SEQ ID NO: 702, SEQ ID NO: 704, SEQ ID NO: 706, SEQ ID NO: 708, SEQ ID NO: 710, SEQ ID NO: 712, SEQ ID NO: 714, SEQ ID NO: 716, SEQ ID NO: 718, and SEQ ID NO: 720.

2. The recombinant lignocellulose degradation enzyme of claim 1, wherein the enzyme is a glycohydrolase.

3. (canceled)

4. An isolated nucleic acid encoding a polypeptide of claim 1.

5. The isolated nucleic acid of claim 4, wherein the nucleic acid has a sequence selected from the group consisting of SEQ ID NO: 179, SEQ ID NO: 181, SEQ ID NO: 183, SEQ ID NO: 185, SEQ ID NO: 187, SEQ ID NO: 189, SEQ ID NO: 191, SEQ ID NO: 193, SEQ ID NO: 195, SEQ ID NO: 197, SEQ ID NO: 199, SEQ ID NO: 201, SEQ ID NO: 203, SEQ ID NO: 205, SEQ ID NO: 207, SEQ ID NO: 209, SEQ ID NO: 211, SEQ ID NO: 213, SEQ ID NO: 215, SEQ ID NO: 217, SEQ ID NO: 219, SEQ ID NO: 221, SEQ ID NO: 223, SEQ ID NO: 225, SEQ ID NO: 227, SEQ ID NO: 229, SEQ ID NO: 231, SEQ ID NO: 233, SEQ ID NO: 235, SEQ ID NO: 237, SEQ ID NO: 239, SEQ ID NO: 241, SEQ ID NO: 243, SEQ ID NO: 245, SEQ ID NO: 247, SEQ ID NO: 249, SEQ ID NO: 251, SEQ ID NO: 253, SEQ ID NO: 255, SEQ ID NO: 257, SEQ ID NO: 259, SEQ ID NO: 261, SEQ ID NO: 263, SEQ ID NO: 265, SEQ ID NO: 267, SEQ ID NO: 269, SEQ ID NO: 271, SEQ ID NO: 273, SEQ ID NO: 275, SEQ ID NO: 277, SEQ ID NO: 279, SEQ ID NO: 281, SEQ ID NO: 283, SEQ ID NO: 285, SEQ ID NO: 287, SEQ ID NO: 289, SEQ ID NO: 291, SEQ ID NO: 293, SEQ ID NO: 295, SEQ ID NO: 297, SEQ ID NO: 299, SEQ ID NO: 301, SEQ ID NO: 303, SEQ ID NO: 305, SEQ ID NO: 307, SEQ ID NO: 309, SEQ ID NO: 311, SEQ ID NO: 313, SEQ ID NO: 315, SEQ ID NO: 317, SEQ ID NO: 319, SEQ ID NO: 321, SEQ ID NO: 323, SEQ ID NO: 325, SEQ ID NO: 327, SEQ ID NO: 329, SEQ ID NO: 331, SEQ ID NO: 333, SEQ ID NO: 335, SEQ ID NO: 337, SEQ ID NO: 339, SEQ ID NO: 341, SEQ ID NO: 343, SEQ ID NO: 345, SEQ ID NO: 347, SEQ ID NO: 349, SEQ ID NO: 351, SEQ ID NO: 353, SEQ ID NO: 355, SEQ ID NO: 357, SEQ ID NO: 359, SEQ ID NO: 361, SEQ ID NO: 363, SEQ ID NO: 365, SEQ ID NO: 367, SEQ ID NO: 369, SEQ ID NO: 371, SEQ ID NO: 373, SEQ ID NO: 375, SEQ ID NO: 377, SEQ ID NO: 379, SEQ ID NO: 381, SEQ ID NO: 383, SEQ ID NO: 385, SEQ ID NO: 387, SEQ ID NO: 389, SEQ ID NO: 391, SEQ ID NO: 393, SEQ ID NO: 395, SEQ ID NO: 397, SEQ ID NO: 399, SEQ ID NO: 401, SEQ ID NO: 403, SEQ ID NO: 405, SEQ ID NO: 407, SEQ ID NO: 409, SEQ ID NO: 411, SEQ ID NO: 413, SEQ ID NO: 415, SEQ ID NO: 417, SEQ ID NO: 419, SEQ ID NO: 421, SEQ ID NO: 423, SEQ ID NO: 425, SEQ ID NO: 427, SEQ ID NO: 429, SEQ ID NO: 431, SEQ ID NO: 433, SEQ ID NO: 435, SEQ ID NO: 437, SEQ ID NO: 439, SEQ ID NO: 441, SEQ ID NO: 443, SEQ ID NO: 445, SEQ ID NO: 447, SEQ ID NO: 449, SEQ ID NO: 451, SEQ ID NO: 453, SEQ ID NO: 455, SEQ ID NO: 457, SEQ ID NO: 459, SEQ ID NO: 461, SEQ ID NO: 463, SEQ ID NO: 465, SEQ ID NO: 467, SEQ ID NO: 469, SEQ ID NO: 471, SEQ ID NO: 473, SEQ ID NO: 475, SEQ ID NO: 477, SEQ ID NO: 479, SEQ ID NO: 481, SEQ ID NO: 483, SEQ ID NO: 485, SEQ ID NO: 487, SEQ ID NO: 489, SEQ ID NO: 491, SEQ ID NO: 493, SEQ ID NO: 495, SEQ ID NO: 497, SEQ ID NO: 499, SEQ ID NO: 501, SEQ ID NO: 503, SEQ ID NO: 505, SEQ ID NO: 507, SEQ ID NO: 509, SEQ ID NO: 511, SEQ ID NO: 513, SEQ ID NO: 515, SEQ ID NO: 517, SEQ ID NO: 519, SEQ ID NO: 521, SEQ ID NO: 523, SEQ ID NO: 525, SEQ ID NO: 527, SEQ ID NO: 529, SEQ ID NO: 531, SEQ ID NO: 533, SEQ ID NO: 535, SEQ ID NO: 537, SEQ ID NO: 539, SEQ ID NO: 541, SEQ ID NO: 543, SEQ ID NO: 545, SEQ ID NO: 547, SEQ ID NO: 549, SEQ ID NO: 551, SEQ ID NO: 553, SEQ ID NO: 555, SEQ ID NO: 557, SEQ ID NO: 559, SEQ ID NO: 561, SEQ ID NO: 563, SEQ ID NO: 565, SEQ ID NO: 567, SEQ ID NO: 569, SEQ ID NO: 571, SEQ ID NO: 573, SEQ ID NO: 575, SEQ ID NO: 577, SEQ ID NO: 579, SEQ ID NO: 581, SEQ ID NO: 583, SEQ ID NO: 585, SEQ ID NO: 587, SEQ ID NO: 589, SEQ ID NO: 591, SEQ ID NO: 593, SEQ ID NO: 595, SEQ ID NO: 597, SEQ ID NO: 599, SEQ ID NO: 601, SEQ ID NO: 603, SEQ ID NO: 605, SEQ ID NO: 607, SEQ ID NO: 609, SEQ ID NO: 611, SEQ ID NO: 613, SEQ ID NO: 615, SEQ ID NO: 617, SEQ ID NO: 619, SEQ ID NO: 621, SEQ ID NO: 623, SEQ ID NO: 625, SEQ ID NO: 627, SEQ ID NO: 629, SEQ ID NO: 631, SEQ ID NO: 633, SEQ ID NO: 635, SEQ ID NO: 637, SEQ ID NO: 639, SEQ ID NO: 641, SEQ ID NO: 643, SEQ ID NO: 645, SEQ ID NO: 647, SEQ ID NO: 649, SEQ ID NO: 651, SEQ ID NO: 653, SEQ ID NO: 655, SEQ ID NO: 657, SEQ ID NO: 659, SEQ ID NO: 661, SEQ ID NO: 663, SEQ ID NO: 665, SEQ ID NO: 667, SEQ ID NO: 669, SEQ ID NO: 671, SEQ ID NO: 673, SEQ ID NO: 675, SEQ ID NO: 677, SEQ ID NO: 679, SEQ ID NO: 681, SEQ ID NO: 683, SEQ ID NO: 685, SEQ ID NO: 687, SEQ ID NO: 689, SEQ ID NO: 691, SEQ ID NO: 693, SEQ ID NO: 695, SEQ ID NO: 697, SEQ ID NO: 699, SEQ ID NO: 701, SEQ ID NO: 703, SEQ ID NO: 705, SEQ ID NO: 707, SEQ ID NO: 709, SEQ ID NO: 711, SEQ ID NO: 713, SEQ ID NO: 715, SEQ ID NO: 717, and SEQ ID NO: 719.

6. A recombinant vector comprising an isolated nucleic acid of claim 4, wherein the nucleic acid is operably linked to a promoter.

7. The recombinant vector of claim 6, wherein the promoter is a heterologous promoter.

8. A recombinant vector comprising a nucleic acid encoding a polypeptide having a sequence selected from the group consisting of SEQ ID NO: 180, SEQ ID NO: 182, SEQ ID NO: 184, SEQ ID NO: 186, SEQ ID NO: 188, SEQ ID NO: 190, SEQ ID NO: 192, SEQ ID NO: 194, SEQ ID NO: 196, SEQ ID NO: 198, SEQ ID NO: 200, SEQ ID NO: 202, SEQ ID NO: 204, SEQ ID NO: 206, SEQ ID NO: 208, SEQ ID NO: 210, SEQ ID NO: 212, SEQ ID NO: 214, SEQ ID NO: 216, SEQ ID NO: 218, SEQ ID NO: 220, SEQ ID NO: 222, SEQ ID NO: 224, SEQ ID NO: 226, SEQ ID NO: 228, SEQ ID NO: 230, SEQ ID NO: 232, SEQ ID NO: 234, SEQ ID NO: 236, SEQ ID NO: 238, SEQ ID NO: 240, SEQ ID NO: 242, SEQ ID NO: 244, SEQ ID NO: 246, SEQ ID NO: 248, SEQ ID NO: 250, SEQ ID NO: 252, SEQ ID NO: 254, SEQ ID NO: 256, SEQ ID NO: 258, SEQ ID NO: 260, SEQ ID NO: 262, SEQ ID NO: 264, SEQ ID NO: 266, SEQ ID NO: 268, SEQ ID NO: 270, SEQ ID NO: 272, SEQ ID NO: 274, SEQ ID NO: 276, SEQ ID NO: 278, SEQ ID NO: 280, SEQ ID NO: 282, SEQ ID NO: 284, SEQ ID NO: 286, SEQ ID NO: 288, SEQ ID NO: 290, SEQ ID NO: 292, SEQ ID NO: 294, SEQ ID NO: 296, SEQ ID NO: 298, SEQ ID NO: 300, SEQ ID NO: 302, SEQ ID NO: 304, SEQ ID NO: 306, SEQ ID NO: 308, SEQ ID NO: 310, SEQ ID NO: 312, SEQ ID NO: 314, SEQ ID NO: 316, SEQ ID NO: 318, SEQ ID NO: 320, SEQ ID NO: 322, SEQ ID NO: 324, SEQ ID NO: 326, SEQ ID NO: 328, SEQ ID NO: 330, SEQ ID NO: 332, SEQ ID NO: 334, SEQ ID NO: 336, SEQ ID NO: 338, SEQ ID NO: 340, SEQ ID NO: 342, SEQ ID NO: 344, SEQ ID NO: 346, SEQ ID NO: 348, SEQ ID NO: 350, SEQ ID NO: 352, SEQ ID NO: 354, SEQ ID NO: 356, SEQ ID NO: 358, SEQ ID NO: 360, SEQ ID NO: 362, SEQ ID NO: 364, SEQ ID NO: 366, SEQ ID NO: 368, SEQ ID NO: 370, SEQ ID NO: 372, SEQ ID NO: 374, SEQ ID NO: 376, SEQ ID NO: 378, SEQ ID NO: 380, SEQ ID NO: 382, SEQ ID NO: 384, SEQ ID NO: 386, SEQ ID NO: 388, SEQ ID NO: 390, SEQ ID NO: 392, SEQ ID NO: 394, SEQ ID NO: 396, SEQ ID NO: 398, SEQ ID NO: 400, SEQ ID NO: 402, SEQ ID NO: 404, SEQ ID NO: 406, SEQ ID NO: 408, SEQ ID NO: 410, SEQ ID NO: 412, SEQ ID NO: 414, SEQ ID NO: 416, SEQ ID NO: 418, SEQ ID NO: 420, SEQ ID NO: 422, SEQ ID NO: 424, SEQ ID NO: 426, SEQ ID NO: 428, SEQ ID NO: 430, SEQ ID NO: 432, SEQ ID NO: 434, SEQ ID NO: 436, SEQ ID NO: 438, SEQ ID NO: 440, SEQ ID NO: 442, SEQ ID NO: 444, SEQ ID NO: 446, SEQ ID NO: 448, SEQ ID NO: 450, SEQ ID NO: 452, SEQ ID NO: 454, SEQ ID NO: 456, SEQ ID NO: 458, SEQ ID NO: 460, SEQ ID NO: 462, SEQ ID NO: 464, SEQ ID NO: 466, SEQ ID NO: 468, SEQ ID NO: 470, SEQ ID NO: 472, SEQ ID NO: 474, SEQ ID NO: 476, SEQ ID NO: 478, SEQ ID NO: 480, SEQ ID NO: 482, SEQ ID NO: 484, SEQ ID NO: 486, SEQ ID NO: 488, SEQ ID NO: 490, SEQ ID NO: 492, SEQ ID NO: 494, SEQ ID NO: 496, SEQ ID NO: 498, SEQ ID NO: 500, SEQ ID NO: 502, SEQ ID NO: 504, SEQ ID NO: 506, SEQ ID NO: 508, SEQ ID NO: 510, SEQ ID NO: 512, SEQ ID NO: 514, SEQ ID NO: 516, SEQ ID NO: 518, SEQ ID NO: 520, SEQ ID NO: 522, SEQ ID NO: 524, SEQ ID NO: 526, SEQ ID NO: 528, SEQ ID NO: 530, SEQ ID NO: 532, SEQ ID NO: 534, SEQ ID NO: 536, SEQ ID NO: 538, SEQ ID NO: 540, SEQ ID NO: 542, SEQ ID NO: 544, SEQ ID NO: 546, SEQ ID NO: 548, SEQ ID NO: 550, SEQ ID NO: 552, SEQ ID NO: 554, SEQ ID NO: 556, SEQ ID NO: 558, SEQ ID NO: 560, SEQ ID NO: 562, SEQ ID NO: 564, SEQ ID NO: 566, SEQ ID NO: 568, SEQ ID NO: 570, SEQ ID NO: 572, SEQ ID NO: 574, SEQ ID NO: 576, SEQ ID NO: 578, SEQ ID NO: 580, SEQ ID NO: 582, SEQ ID NO: 584, SEQ ID NO: 586, SEQ ID NO: 588, SEQ ID NO: 590, SEQ ID NO: 592, SEQ ID NO: 594, SEQ ID NO: 596, SEQ ID NO: 598, SEQ ID NO: 600, SEQ ID NO: 602, SEQ ID NO: 604, SEQ ID NO: 606, SEQ ID NO: 608, SEQ ID NO: 610, SEQ ID NO: 612, SEQ ID NO: 614, SEQ ID NO: 616, SEQ ID NO: 618, SEQ ID NO: 620, SEQ ID NO: 622, SEQ ID NO: 624, SEQ ID NO: 626, SEQ ID NO: 628, SEQ ID NO: 630, SEQ ID NO: 632, SEQ ID NO: 634, SEQ ID NO: 636, SEQ ID NO: 638, SEQ ID NO: 640, SEQ ID NO: 642, SEQ ID NO: 644, SEQ ID NO: 646, SEQ ID NO: 648, SEQ ID NO: 650, SEQ ID NO: 652, SEQ ID NO: 654, SEQ ID NO: 656, SEQ ID NO: 658, SEQ ID NO: 660, SEQ ID NO: 662, SEQ ID NO: 664, SEQ ID NO: 666, SEQ ID NO: 668, SEQ ID NO: 670, SEQ ID NO: 672, SEQ ID NO: 674, SEQ ID NO: 676, SEQ ID NO: 678, SEQ ID NO: 680, SEQ ID NO: 682, SEQ ID NO: 684, SEQ ID NO: 686, SEQ ID NO: 688, SEQ ID NO: 690, SEQ ID NO: 692, SEQ ID NO: 694, SEQ ID NO: 696, SEQ ID NO: 698, SEQ ID NO: 700, SEQ ID NO: 702, SEQ ID NO: 704, SEQ ID NO: 706, SEQ ID NO: 708, SEQ ID NO: 710, SEQ ID NO: 712, SEQ ID NO: 714, SEQ ID NO: 716, SEQ ID NO: 718, and SEQ ID NO: 720; or selected from the group consisting of SEQ ID NO:2, SEQ ID NO: 4, SEQ ID NO: 6, SEQ ID NO: 8, SEQ ID NO: 10, SEQ ID NO: 12, SEQ ID NO: 14, SEQ ID NO: 16, SEQ ID NO: 18, SEQ ID NO: 20, SEQ ID NO: 22, SEQ ID NO: 24, SEQ ID NO: 26, SEQ ID NO: 28, SEQ ID NO: 30, SEQ ID NO: 32, SEQ ID NO: 34, SEQ ID NO: 36, SEQ ID NO: 38, SEQ ID NO: 40, SEQ ID NO: 42, SEQ ID NO: 44, SEQ ID NO: 46, SEQ ID NO: 48, SEQ ID NO: 50, SEQ ID NO: 52, SEQ ID NO: 54, SEQ ID NO: 56, SEQ ID NO: 58, SEQ ID NO: 60, SEQ ID NO: 62, SEQ ID NO: 64, SEQ ID NO: 66, SEQ ID NO: 68, SEQ ID NO: 70, SEQ ID NO: 72, SEQ ID NO: 74, SEQ ID NO: 76, SEQ ID NO: 78, SEQ ID NO: 80, SEQ ID NO: 82, SEQ ID NO: 84, SEQ ID NO: 86, SEQ ID NO: 88, SEQ ID NO: 90, SEQ ID NO: 92, SEQ ID NO: 94, SEQ ID NO: 96, SEQ ID NO: 98, SEQ ID NO: 100, SEQ ID NO: 102, SEQ ID NO: 104, SEQ ID NO: 106, SEQ ID NO: 108, SEQ ID NO: 110, SEQ ID NO: 112, SEQ ID NO: 114, SEQ ID NO: 116, SEQ ID NO: 118, SEQ ID NO: 120, SEQ ID NO: 122, SEQ ID NO: 124, SEQ ID NO: 126, SEQ ID NO: 128, SEQ ID NO: 130, SEQ ID NO: 132, SEQ ID NO: 134, SEQ ID NO: 136, SEQ ID NO: 138, SEQ ID NO: 140, SEQ ID NO: 142, SEQ ID NO: 144, SEQ ID NO: 146, SEQ ID NO: 148, SEQ ID NO: 150, SEQ ID NO: 152, SEQ ID NO: 154, SEQ ID NO: 156, SEQ ID NO: 158, SEQ ID NO: 160, SEQ ID NO: 162, SEQ ID NO: 164, SEQ ID NO: 166, SEQ ID NO: 168, SEQ ID NO: 170, SEQ ID NO: 172, SEQ ID NO: 174, SEQ ID NO: 176, and SEQ ID NO: 178; wherein the nucleic acid is operably linked to a heterologous promoter.

9. The recombinant vector of claim 8, wherein the nucleic acid has a polynucleotide sequence selected from the group consisting of SEQ ID NO: 179, SEQ ID NO: 181, SEQ ID NO: 183, SEQ ID NO: 185, SEQ ID NO: 187, SEQ ID NO: 189, SEQ ID NO: 191, SEQ ID NO: 193, SEQ ID NO: 195, SEQ ID NO: 197, SEQ ID NO: 199, SEQ ID NO: 201, SEQ ID NO: 203, SEQ ID NO: 205, SEQ ID NO: 207, SEQ ID NO: 209, SEQ ID NO: 211, SEQ ID NO: 213, SEQ ID NO: 215, SEQ ID NO: 217, SEQ ID NO: 219, SEQ ID NO: 221, SEQ ID NO: 223, SEQ ID NO: 225, SEQ ID NO: 227, SEQ ID NO: 229, SEQ ID NO: 231, SEQ ID NO: 233, SEQ ID NO: 235, SEQ ID NO: 237, SEQ ID NO: 239, SEQ ID NO: 241, SEQ ID NO: 243, SEQ ID NO: 245, SEQ ID NO: 247, SEQ ID NO: 249, SEQ ID NO: 251, SEQ ID NO: 253, SEQ ID NO: 255, SEQ ID NO: 257, SEQ ID NO: 259, SEQ ID NO: 261, SEQ ID NO: 263, SEQ ID NO: 265, SEQ ID NO: 267, SEQ ID NO: 269, SEQ ID NO: 271, SEQ ID NO: 273, SEQ ID NO: 275, SEQ ID NO: 277, SEQ ID NO: 279, SEQ ID NO: 281, SEQ ID NO: 283, SEQ ID NO: 285, SEQ ID NO: 287, SEQ ID NO: 289, SEQ ID NO: 291, SEQ ID NO: 293, SEQ ID NO: 295, SEQ ID NO: 297, SEQ ID NO: 299, SEQ ID NO: 301, SEQ ID NO: 303, SEQ ID NO: 305, SEQ ID NO: 307, SEQ ID NO: 309, SEQ ID NO: 311, SEQ ID NO: 313, SEQ ID NO: 315, SEQ ID NO: 317, SEQ ID NO: 319, SEQ ID NO: 321, SEQ ID NO: 323, SEQ ID NO: 325, SEQ ID NO: 327, SEQ ID NO: 329, SEQ ID NO: 331, SEQ ID NO: 333, SEQ ID NO: 335, SEQ ID NO: 337, SEQ ID NO: 339, SEQ ID NO: 341, SEQ ID NO: 343, SEQ ID NO: 345, SEQ ID NO: 347, SEQ ID NO: 349, SEQ ID NO: 351, SEQ ID NO: 353, SEQ ID NO: 355, SEQ ID NO: 357, SEQ ID NO: 359, SEQ ID NO: 361, SEQ ID NO: 363, SEQ ID NO: 365, SEQ ID NO: 367, SEQ ID NO: 369, SEQ ID NO: 371, SEQ ID NO: 373, SEQ ID NO: 375, SEQ ID NO: 377, SEQ ID NO: 379, SEQ ID NO: 381, SEQ ID NO: 383, SEQ ID NO: 385, SEQ ID NO: 387, SEQ ID NO: 389, SEQ ID NO: 391, SEQ ID NO: 393, SEQ ID NO: 395, SEQ ID NO: 397, SEQ ID NO: 399, SEQ ID NO: 401, SEQ ID NO: 403, SEQ ID NO: 405, SEQ ID NO: 407, SEQ ID NO: 409, SEQ ID NO: 411, SEQ ID NO: 413, SEQ ID NO: 415, SEQ ID NO: 417, SEQ ID NO: 419, SEQ ID NO: 421, SEQ ID NO: 423, SEQ ID NO: 425, SEQ ID NO: 427, SEQ ID NO: 429, SEQ ID NO: 431, SEQ ID NO: 433, SEQ ID NO: 435, SEQ ID NO: 437, SEQ ID NO: 439, SEQ ID NO: 441, SEQ ID NO: 443, SEQ ID NO: 445, SEQ ID NO: 447, SEQ ID NO: 449, SEQ ID NO: 451, SEQ ID NO: 453, SEQ ID NO: 455, SEQ ID NO: 457, SEQ ID NO: 459, SEQ ID NO: 461, SEQ ID NO: 463, SEQ ID NO: 465, SEQ ID NO: 467, SEQ ID NO: 469, SEQ ID NO: 471, SEQ ID NO: 473, SEQ ID NO: 475, SEQ ID NO: 477, SEQ ID NO: 479, SEQ ID NO: 481, SEQ ID NO: 483, SEQ ID NO: 485, SEQ ID NO: 487, SEQ ID NO: 489, SEQ ID NO: 491, SEQ ID NO: 493, SEQ ID NO: 495, SEQ ID NO: 497, SEQ ID NO: 499, SEQ ID NO: 501, SEQ ID NO: 503, SEQ ID NO: 505, SEQ ID NO: 507, SEQ ID NO: 509, SEQ ID NO: 511, SEQ ID NO: 513, SEQ ID NO: 515, SEQ ID NO: 517, SEQ ID NO: 519, SEQ ID NO: 521, SEQ ID NO: 523, SEQ ID NO: 525, SEQ ID NO: 527, SEQ ID NO: 529, SEQ ID NO: 531, SEQ ID NO: 533, SEQ ID NO: 535, SEQ ID NO: 537, SEQ ID NO: 539, SEQ ID NO: 541, SEQ ID NO: 543, SEQ ID NO: 545, SEQ ID NO: 547, SEQ ID NO: 549, SEQ ID NO: 551, SEQ ID NO: 553, SEQ ID NO: 555, SEQ ID NO: 557, SEQ ID NO: 559, SEQ ID NO: 561, SEQ ID NO: 563, SEQ ID NO: 565, SEQ ID NO: 567, SEQ ID NO: 569, SEQ ID NO: 571, SEQ ID NO: 573, SEQ ID NO: 575, SEQ ID NO: 577, SEQ ID NO: 579, SEQ ID NO: 581, SEQ ID NO: 583, SEQ ID NO: 585, SEQ ID NO: 587, SEQ ID NO: 589, SEQ ID NO: 591, SEQ ID NO: 593, SEQ ID NO: 595, SEQ ID NO: 597, SEQ ID NO: 599, SEQ ID NO: 601, SEQ ID NO: 603, SEQ ID NO: 605, SEQ ID NO: 607, SEQ ID NO: 609, SEQ ID NO: 611, SEQ ID NO: 613, SEQ ID NO: 615, SEQ ID NO: 617, SEQ ID NO: 619, SEQ ID NO: 621, SEQ ID NO: 623, SEQ ID NO: 625, SEQ ID NO: 627, SEQ ID NO: 629, SEQ ID NO: 631, SEQ ID NO: 633, SEQ ID NO: 635, SEQ ID NO: 637, SEQ ID NO: 639, SEQ ID NO: 641, SEQ ID NO: 643, SEQ ID NO: 645, SEQ ID NO: 647, SEQ ID NO: 649, SEQ ID NO: 651, SEQ ID NO: 653, SEQ ID NO: 655, SEQ ID NO: 657, SEQ ID NO: 659, SEQ ID NO: 661, SEQ ID NO: 663, SEQ ID NO: 665, SEQ ID NO: 667, SEQ ID NO: 669, SEQ ID NO: 671, SEQ ID NO: 673, SEQ ID NO: 675, SEQ ID NO: 677, SEQ ID NO: 679, SEQ ID NO: 681, SEQ ID NO: 683, SEQ ID NO: 685, SEQ ID NO: 687, SEQ ID NO: 689, SEQ ID NO: 691, SEQ ID NO: 693, SEQ ID NO: 695, SEQ ID NO: 697, SEQ ID NO: 699, SEQ ID NO: 701, SEQ ID NO: 703, SEQ ID NO: 705, SEQ ID NO: 707, SEQ ID NO: 709, SEQ ID NO: 711, SEQ ID NO: 713, SEQ ID NO: 715, SEQ ID NO: 717, and SEQ ID NO: 719; or selected from the group consisting of SEQ ID NO: 1, SEQ ID NO: 3, SEQ ID NO: 5, SEQ ID NO: 7, SEQ ID NO: 9, SEQ ID NO: 11, SEQ ID NO: 13, SEQ ID NO: 15, SEQ ID NO: 17, SEQ ID NO: 19, SEQ ID NO: 21, SEQ ID NO: 23, SEQ ID NO: 25, SEQ ID NO: 27, SEQ ID NO: 29, SEQ ID NO: 31, SEQ ID NO: 33, SEQ ID NO: 35, SEQ ID NO: 37, SEQ ID NO: 39, SEQ ID NO: 41, SEQ ID NO: 43, SEQ ID NO: 45, SEQ ID NO: 47, SEQ ID NO: 49, SEQ ID NO: 51, SEQ ID NO: 53, SEQ ID NO: 55, SEQ ID NO: 57, SEQ ID NO: 59, SEQ ID NO: 61, SEQ ID NO: 63, SEQ ID NO: 65, SEQ ID NO: 67, SEQ ID NO: 69, SEQ ID NO: 71, SEQ ID NO: 73, SEQ ID NO: 75, SEQ ID NO: 77, SEQ ID NO: 79, SEQ ID NO: 81, SEQ ID NO: 83, SEQ ID NO: 85, SEQ ID NO: 87, SEQ ID NO: 89, SEQ ID NO: 91, SEQ ID NO: 93, SEQ ID NO: 95, SEQ ID NO: 97, SEQ ID NO: 99, SEQ ID NO: 101, SEQ ID NO: 103, SEQ ID NO: 105, SEQ ID NO: 107, SEQ ID NO: 109, SEQ ID NO: 111, SEQ ID NO: 113, SEQ ID NO: 115, SEQ ID NO: 117, SEQ ID NO: 119, SEQ ID NO: 121, SEQ ID NO: 123, SEQ ID NO: 125, SEQ ID NO: 127, SEQ ID NO: 129, SEQ ID NO: 131, SEQ ID NO: 133, SEQ ID NO: 135, SEQ ID NO: 137, SEQ ID NO: 139, SEQ ID NO: 141, SEQ ID NO: 143, SEQ ID NO: 145, SEQ ID NO: 147, SEQ ID NO: 149, SEQ ID NO: 151, SEQ ID NO: 153, SEQ ID NO: 155, SEQ ID NO: 157, SEQ ID NO: 159, SEQ ID NO: 161, SEQ ID NO: 163, SEQ ID NO: 165, SEQ ID NO: 167, SEQ ID NO: 169, SEQ ID NO: 171, SEQ ID NO: 173, SEQ ID NO: 175, and SEQ ID NO: 177.

10. A host cell comprising a recombinant vector of claim 8.

11. (canceled)

12. A method of producing a lignocellulose degradation enzyme, the method comprising culturing a cell that comprises a recombinant vector of claim 8 under conditions in which the enzyme is produced.

13. The method of claim 12, wherein the lignocellulose degradation enzyme is a glycohydrolase.

14. (canceled)

15. The method of claim 12, wherein the cell expresses at least one other recombinant lignocellulose degradation enzyme.

16. The method of claim 12, further comprising a step of recovering the lignocellulose degradation enzyme from the medium in which the cell is cultured or from a lysate of the cell.

17. A method for degrading a cellulosic biomass, the method comprising contacting the cellulosic biomass with a composition comprising a recombinant lignocellulose degradation enzyme of claim 1.

18. The method of claim 17, wherein the lignocellulose degradation enzyme is encoded by a polynucleotide having a nucleic acid sequence selected from the group consisting of SEQ ID NO: 179, SEQ ID NO: 181, SEQ ID NO: 183, SEQ ID NO: 185, SEQ ID NO: 187, SEQ ID NO: 189, SEQ ID NO: 191, SEQ ID NO: 193, SEQ ID NO: 195, SEQ ID NO: 197, SEQ ID NO: 199, SEQ ID NO: 201, SEQ ID NO: 203, SEQ ID NO: 205, SEQ ID NO: 207, SEQ ID NO: 209, SEQ ID NO: 211, SEQ ID NO: 213, SEQ ID NO: 215, SEQ ID NO: 217, SEQ ID NO: 219, SEQ ID NO: 221, SEQ ID NO: 223, SEQ ID NO: 225, SEQ ID NO: 227, SEQ ID NO: 229, SEQ ID NO: 231, SEQ ID NO: 233, SEQ ID NO: 235, SEQ ID NO: 237, SEQ ID NO: 239, SEQ ID NO: 241, SEQ ID NO: 243, SEQ ID NO: 245, SEQ ID NO: 247, SEQ ID NO: 249, SEQ ID NO: 251, SEQ ID NO: 253, SEQ ID NO: 255, SEQ ID NO: 257, SEQ ID NO: 259, SEQ ID NO: 261, SEQ ID NO: 263, SEQ ID NO: 265, SEQ ID NO: 267, SEQ ID NO: 269, SEQ ID NO: 271, SEQ ID NO: 273, SEQ ID NO: 275, SEQ ID NO: 277, SEQ ID NO: 279, SEQ ID NO: 281, SEQ ID NO: 283, SEQ ID NO: 285, SEQ ID NO: 287, SEQ ID NO: 289, SEQ ID NO: 291, SEQ ID NO: 293, SEQ ID NO: 295, SEQ ID NO: 297, SEQ ID NO: 299, SEQ ID NO: 301, SEQ ID NO: 303, SEQ ID NO: 305, SEQ ID NO: 307, SEQ ID NO: 309, SEQ ID NO: 311, SEQ ID NO: 313, SEQ ID NO: 315, SEQ ID NO: 317, SEQ ID NO: 319, SEQ ID NO: 321, SEQ ID NO: 323, SEQ ID NO: 325, SEQ ID NO: 327, SEQ ID NO: 329, SEQ ID NO: 331, SEQ ID NO: 333, SEQ ID NO: 335, SEQ ID NO: 337, SEQ ID NO: 339, SEQ ID NO: 341, SEQ ID NO: 343, SEQ ID NO: 345, SEQ ID NO: 347, SEQ ID NO: 349, SEQ ID NO: 351, SEQ ID NO: 353, SEQ ID NO: 355, SEQ ID NO: 357, SEQ ID NO: 359, SEQ ID NO: 361, SEQ ID NO: 363, SEQ ID NO: 365, SEQ ID NO: 367, SEQ ID NO: 369, SEQ ID NO: 371, SEQ ID NO: 373, SEQ ID NO: 375, SEQ ID NO: 377, SEQ ID NO: 379, SEQ ID NO: 381, SEQ ID NO: 383, SEQ ID NO: 385, SEQ ID NO: 387, SEQ ID NO: 389, SEQ ID NO: 391, SEQ ID NO: 393, SEQ ID NO: 395, SEQ ID NO: 397, SEQ ID NO: 399, SEQ ID NO: 401, SEQ ID NO: 403, SEQ ID NO: 405, SEQ ID NO: 407, SEQ ID NO: 409, SEQ ID NO: 411, SEQ ID NO: 413, SEQ ID NO: 415, SEQ ID NO: 417, SEQ ID NO: 419, SEQ ID NO: 421, SEQ ID NO: 423, SEQ ID NO: 425, SEQ ID NO: 427, SEQ ID NO: 429, SEQ ID NO: 431, SEQ ID NO: 433, SEQ ID NO: 435, SEQ ID NO: 437, SEQ ID NO: 439, SEQ ID NO: 441, SEQ ID NO: 443, SEQ ID NO: 445, SEQ ID NO: 447, SEQ ID NO: 449, SEQ ID NO: 451, SEQ ID NO: 453, SEQ ID NO: 455, SEQ ID NO: 457, SEQ ID NO: 459, SEQ ID NO: 461, SEQ ID NO: 463, SEQ ID NO: 465, SEQ ID NO: 467, SEQ ID NO: 469, SEQ ID NO: 471, SEQ ID NO: 473, SEQ ID NO: 475, SEQ ID NO: 477, SEQ ID NO: 479, SEQ ID NO: 481, SEQ ID NO: 483, SEQ ID NO: 485, SEQ ID NO: 487, SEQ ID NO: 489, SEQ ID NO: 491, SEQ ID NO: 493, SEQ ID NO: 495, SEQ ID NO: 497, SEQ ID NO: 499, SEQ ID NO: 501, SEQ ID NO: 503, SEQ ID NO: 505, SEQ ID NO: 507, SEQ ID NO: 509, SEQ ID NO: 511, SEQ ID NO: 513, SEQ ID NO: 515, SEQ ID NO: 517, SEQ ID NO: 519, SEQ ID NO: 521, SEQ ID NO: 523, SEQ ID NO: 525, SEQ ID NO: 527, SEQ ID NO: 529, SEQ ID NO: 531, SEQ ID NO: 533, SEQ ID NO: 535, SEQ ID NO: 537, SEQ ID NO: 539, SEQ ID NO: 541, SEQ ID NO: 543, SEQ ID NO: 545, SEQ ID NO: 547, SEQ ID NO: 549, SEQ ID NO: 551, SEQ ID NO: 553, SEQ ID NO: 555, SEQ ID NO: 557, SEQ ID NO: 559, SEQ ID NO: 561, SEQ ID NO: 563, SEQ ID NO: 565, SEQ ID NO: 567, SEQ ID NO: 569, SEQ ID NO: 571, SEQ ID NO: 573, SEQ ID NO: 575, SEQ ID NO: 577, SEQ ID NO: 579, SEQ ID NO: 581, SEQ ID NO: 583, SEQ ID NO: 585, SEQ ID NO: 587, SEQ ID NO: 589, SEQ ID NO: 591, SEQ ID NO: 593, SEQ ID NO: 595, SEQ ID NO: 597, SEQ ID NO: 599, SEQ ID NO: 601, SEQ ID NO: 603, SEQ ID NO: 605, SEQ ID NO: 607, SEQ ID NO: 609, SEQ ID NO: 611, SEQ ID NO: 613, SEQ ID NO: 615, SEQ ID NO: 617, SEQ ID NO: 619, SEQ ID NO: 621, SEQ ID NO: 623, SEQ ID NO: 625, SEQ ID NO: 627, SEQ ID NO: 629, SEQ ID NO: 631, SEQ ID NO: 633, SEQ ID NO: 635, SEQ ID NO: 637, SEQ ID NO: 639, SEQ ID NO: 641, SEQ ID NO: 643, SEQ ID NO: 645, SEQ ID NO: 647, SEQ ID NO: 649, SEQ ID NO: 651, SEQ ID NO: 653, SEQ ID NO: 655, SEQ ID NO: 657, SEQ ID NO: 659, SEQ ID NO: 661, SEQ ID NO: 663, SEQ ID NO: 665, SEQ ID NO: 667, SEQ ID NO: 669, SEQ ID NO: 671, SEQ ID NO: 673, SEQ ID NO: 675, SEQ ID NO: 677, SEQ ID NO: 679, SEQ ID NO: 681, SEQ ID NO: 683, SEQ ID NO: 685, SEQ ID NO: 687, SEQ ID NO: 689, SEQ ID NO: 691, SEQ ID NO: 693, SEQ ID NO: 695, SEQ ID NO: 697, SEQ ID NO: 699, SEQ ID NO: 701, SEQ ID NO: 703, SEQ ID NO: 705, SEQ ID NO: 707, SEQ ID NO: 709, SEQ ID NO: 711, SEQ ID NO: 713, SEQ ID NO: 715, SEQ ID NO: 717, and SEQ ID NO: 719.

19. The method of claim 17, wherein the composition is a cell culture medium into which the lignocellulose degradation enzyme has been secreted by cells expressing the enzyme.

20. (canceled)

21. The method of claim 17, wherein the lignocellulose degradation enzyme is a glycohydrolase.

22. (canceled)

23. A composition comprising a cellulase and a recombinant lignocellulose degradation enzyme of claim 1.

24. (canceled)

25. A composition of claim 23, wherein the lignocellulose degradation enzyme is a glyocoside hydrolase lignocellulose degradation enzyme and further, wherein the cellulase is different from the glycoside hydrolase lignocellulose degradation enzyme.

26. The composition of claim 25, wherein the glyocoside hydrolase lignocellulose degradation enzyme is set forth in Table 2.

27.-28. (canceled)
